United States Patent Application Publication US 2024/0401031 A1 - sequence listing, part 2

SEQ ID NO: 671 - DNA, 3884 bp, Homo sapiens
  source 1..3884: mol_type = genomic DNA
  misc_feature 1..3884: note = cDNA of KCNH2 gene SNP c.2832G>C (p.Glu944Asp)
atgccggtgcggaggggccacgtcgcgccgcagaacaccttcctggacaccatcatccgcaagtttgagggccagagccgtaagttcatcatcgccaacgctcgggtggagaactgcgccgtcatctactgcaacgacggcttctgcgagctgtgcggctactcgcgggccgaggtgatgcagcgaccctgcacctgcgacttcctgcacgggccgcgcacgcagcgccgcgctgccgcgcagatcgcgcaggcactgctgggcgccgaggagcgcaaagtggaaatcgccttctaccggaaagatgggagctgcttcctatgtctggtggatgtggtgcccgtgaagaacgaggatggggctgtcatcatgttcatcctcaatttcgaggtggtgatggagaaggacatggtggggtccccggctcatgacaccaaccaccggggcccccccaccagctggctggccccaggccgcgccaagaccttccgcctgaagctgcccgcgctgctggcgctgacggcccgggagtcgtcggtgcggtcgggcggcgcgggcggcgcgggcgccccgggggccgtggtggtggacgtggacctgacgcccgcggcacccagcagcgagtcgctggccctggacgaagtgacagccatggacaaccacgtggcagggctcgggcccgcggaggagcggcgtgcgctggtgggtcccggctctccgccccgcagcgcgcccggccagctcccatcgccccgggcgcacagcctcaaccccgacgcctcgggctccagctgcagcctggcccggacgcgctcccgagaaagctgcgccagcgtgcgccgcgcctcgtcggccgacgacatcgaggccatgcgcgccggggtgctgcccccgccaccgcgccacgccagcaccggggccatgcacccactgcgcagcggcttgctcaactccacctcggactccgacctcgtgcgctaccgcaccattagcaagattccccaaatcaccctcaactttgtggacctcaagggcgaccccttcttggcttcgcccaccagtgaccgtgagatcatagcacctaagataaaggagcgaacccacaatgtcactgagaaggtcacccaggtcctgtccctgggcgccgacgtgctgcctgagtacaagctgcaggcaccgcgcatccaccgctggaccatcctgcattacagccccttcaaggccgtgtgggactggctcatcctgctgctggtcatctacacggctgtcttcacaccctactcggctgccttcctgctgaaggagacggaagaaggcccgcctgctaccgagtgtggctacgcctgccagccgctggctgtggtggacctcatcgtggacatcatgttcattgtggacatcctcatcaacttccgcaccacctacgtcaatgccaacgaggaggtggtcagccaccccggccgcatcgccgtccactacttcaagggctggttcctcatcgacatggtggccgccatccccttcgacctgctcatcttcggctctggctctgaggagctgatcgggctgctgaagactgcgcggctgctgcggctggtgcgcgtggcgcggaagctggatcgctactcagagtacggcgcggccgtgctgttcttgctcatgtgcacctttgcgctcatcgcgcactggctagcctgcatctggtacgccatcggcaacatggagcagccacacatggactcacgcatcggctggctgcacaacctgggcgaccagataggcaaaccctacaacagcagcggcctgggcggcccctccatcaaggacaagtatgtgacggcgctctacttcaccttcagcagcctcaccagtgtgggcttcggcaacgtctctcccaacaccaactcagagaagatcttctccatctgcgtcatgctcattggctccctcatgtatgctagcatcttcggcaacgtgtcggccatcatccagcggctgtactcgggcacagcccgctaccacacacagatgctgcgggtgcgggagttcatccgcttccaccagatccccaatcccctgcgccagcgcctcgaggagtacttccagcacgcctggtcctacaccaacggcatcgacatgaacgcggtgctgaagggcttccctgagtgcctgcaggctgacatctgcctgcacctgaaccgctcactgctgcagcactgcaaacccttccgaggggccaccaagggctgccttcgggccctggccatgaagttcaagaccacacatgcaccgccaggggacacactggtgcatgctggggacctgctcaccgccctgtacttcatctcccggggctccatcgagatcctgcggggcgacgtcgtcgtggccatcctggggaagaatgacatctttggggagcctctgaacctgtatgcaaggcctggcaagtcgaacggggatgtgcgggccctcacctactgtgacctacacaagatccatcgggacgacctgctggaggtgctggacatgtaccctgagttctccgaccacttctggtccagcctggagatcaccttcaacctgcgagataccaacatgatcccgggctcccccggcagtacggagttagagggtggcttcagtcggcaacgcaagcgcaagttgtccttccgcaggcgcacggacaaggacacggagcagccaggggaggtgtcggccttggggccgggccgggcgggggcagggccgagtagccggggccggccgggggggccgtggggggagagcccgtccagtggcccctccagccctgagagcagtgaggatgacggcccaggccgcagctccagccccctccgcctggtgcccttctccagccccaggccccccggagagccgccgggtggggagcccctgatggaggactgcgagaagagcagcgacacttgcaaccccctgtcaggcgccttctcaggagtgtccaacattttcagcttctggggggacagtcggggccgccagtaccaggagctccctcgatgccccgcccccacccccagcctcctcaacatccccctctccagcccgggtcggcggccccggggcgacgtggagagcaggctggatgccctccagcgccagctcaacaggctggagacccggctgagtgcagacatggccactgtcctgcagctgctacagaggcagatgacgctggtcccgcccgcctacagtgctgtgaccaccccggggcctggccccacttccacatccccgctgttgcccgtcagccccctccccaccctcaccttggactcgctttctcaggtttcccagttcatggcgtgtgaggagctgcccccgggggccccagagcttccccaagaaggccccacacgacgcctctccctaccgggccagctgggggccctcacctcccagcccctgcacagacacggctcggacccgggcagttagtggggctgcccagtgtggacacgtggctcacccagggatcaaggcgctgctgggccgctccccttggaggccctgctcaggaggccctgaccgtggaaggggagaggaactcgaaagcacagctcctcccccagcccttgggaccatcttctcctgcagtcccctgggccccagtgagaggggcaggggcagggccggcagtaggtggggcctgtggtccccccactgccctgagggcattagctggtctaactgcccggaggcacccggccctgggccttaggcacctcaaggacttttctgctatttactgctcttattgttaaggataataattaaggatcatatgaataattaatgaagatgctgatgactatgaataataaataattatcctgaggaga

SEQ ID NO: 672 - DNA, 3884 bp, Homo sapiens
  source 1..3884: mol_type = genomic DNA
  misc_feature 1..3884: note = cDNA of KCNH2 gene SNP c.2832G>T (p.Glu944Asp)
atgccggtgcggaggggccacgtcgcgccgcagaacaccttcctggacaccatcatccgcaagtttgagggccagagccgtaagttcatcatcgccaacgctcgggtggagaactgcgccgtcatctactgcaacgacggcttctgcgagctgtgcggctactcgcgggccgaggtgatgcagcgaccctgcacctgcgacttcctgcacgggccgcgcacgcagcgccgcgctgccgcgcagatcgcgcaggcactgctgggcgccgaggagcgcaaagtggaaatcgccttctaccggaaagatgggagctgcttcctatgtctggtggatgtggtgcccgtgaagaacgaggatggggctgtcatcatgttcatcctcaatttcgaggtggtgatggagaaggacatggtggggtccccggctcatgacaccaaccaccggggcccccccaccagctggctggccccaggccgcgccaagaccttccgcctgaagctgcccgcgctgctggcgctgacggcccgggagtcgtcggtgcggtcgggcggcgcgggcggcgcgggcgccccgggggccgtggtggtggacgtggacctgacgcccgcggcacccagcagcgagtcgctggccctggacgaagtgacagccatggacaaccacgtggcagggctcgggcccgcggaggagcggcgtgcgctggtgggtcccggctctccgccccgcagcgcgcccggccagctcccatcgccccgggcgcacagcctcaaccccgacgcctcgggctccagctgcagcctggcccggacgcgctcccgagaaagctgcgccagcgtgcgccgcgcctcgtcggccgacgacatcgaggccatgcgcgccggggtgctgcccccgccaccgcgccacgccagcaccggggccatgcacccactgcgcagcggcttgctcaactccacctcggactccgacctcgtgcgctaccgcaccattagcaagattccccaaatcaccctcaactttgtggacctcaagggcgaccccttcttggcttcgcccaccagtgaccgtgagatcatagcacctaagataaaggagcgaacccacaatgtcactgagaaggtcacccaggtcctgtccctgggcgccgacgtgctgcctgagtacaagctgcaggcaccgcgcatccaccgctggaccatcctgcattacagccccttcaaggccgtgtgggactggctcatcctgctgctggtcatctacacggctgtcttcacaccctactcggctgccttcctgctgaaggagacggaagaaggcccgcctgctaccgagtgtggctacgcctgccagccgctggctgtggtggacctcatcgtggacatcatgttcattgtggacatcctcatcaacttccgcaccacctacgtcaatgccaacgaggaggtggtcagccaccccggccgcatcgccgtccactacttcaagggctggttcctcatcgacatggtggccgccatccccttcgacctgctcatcttcggctctggctctgaggagctgatcgggctgctgaagactgcgcggctgctgcggctggtgcgcgtggcgcggaagctggatcgctactcagagtacggcgcggccgtgctgttcttgctcatgtgcacctttgcgctcatcgcgcactggctagcctgcatctggtacgccatcggcaacatggagcagccacacatggactcacgcatcggctggctgcacaacctgggcgaccagataggcaaaccctacaacagcagcggcctgggcggcccctccatcaaggacaagtatgtgacggcgctctacttcaccttcagcagcctcaccagtgtgggcttcggcaacgtctctcccaacaccaactcagagaagatcttctccatctgcgtcatgctcattggctccctcatgtatgctagcatcttcggcaacgtgtcggccatcatccagcggctgtactcgggcacagcccgctaccacacacagatgctgcgggtgcgggagttcatccgcttccaccagatccccaatcccctgcgccagcgcctcgaggagtacttccagcacgcctggtcctacaccaacggcatcgacatgaacgcggtgctgaagggcttccctgagtgcctgcaggctgacatctgcctgcacctgaaccgctcactgctgcagcactgcaaacccttccgaggggccaccaagggctgccttcgggccctggccatgaagttcaagaccacacatgcaccgccaggggacacactggtgcatgctggggacctgctcaccgccctgtacttcatctcccggggctccatcgagatcctgcggggcgacgtcgtcgtggccatcctggggaagaatgacatctttggggagcctctgaacctgtatgcaaggcctggcaagtcgaacggggatgtgcgggccctcacctactgtgacctacacaagatccatcgggacgacctgctggaggtgctggacatgtaccctgagttctccgaccacttctggtccagcctggagatcaccttcaacctgcgagataccaacatgatcccgggctcccccggcagtacggagttagagggtggcttcagtcggcaacgcaagcgcaagttgtccttccgcaggcgcacggacaaggacacggagcagccaggggaggtgtcggccttggggccgggccgggcgggggcagggccgagtagccggggccggccgggggggccgtggggggagagcccgtccagtggcccctccagccctgagagcagtgaggatgatggcccaggccgcagctccagccccctccgcctggtgcccttctccagccccaggccccccggagagccgccgggtggggagcccctgatggaggactgcgagaagagcagcgacacttgcaaccccctgtcaggcgccttctcaggagtgtccaacattttcagcttctggggggacagtcggggccgccagtaccaggagctccctcgatgccccgcccccacccccagcctcctcaacatccccctctccagcccgggtcggcggccccggggcgacgtggagagcaggctggatgccctccagcgccagctcaacaggctggagacccggctgagtgcagacatggccactgtcctgcagctgctacagaggcagatgacgctggtcccgcccgcctacagtgctgtgaccaccccggggcctggccccacttccacatccccgctgttgcccgtcagccccctccccaccctcaccttggactcgctttctcaggtttcccagttcatggcgtgtgaggagctgcccccgggggccccagagcttccccaagaaggccccacacgacgcctctccctaccgggccagctgggggccctcacctcccagcccctgcacagacacggctcggacccgggcagttagtggggctgcccagtgtggacacgtggctcacccagggatcaaggcgctgctgggccgctccccttggaggccctgctcaggaggccctgaccgtggaaggggagaggaactcgaaagcacagctcctcccccagcccttgggaccatcttctcctgcagtcccctgggccccagtgagaggggcaggggcagggccggcagtaggtggggcctgtggtccccccactgccctgagggcattagctggtctaactgcccggaggcacccggccctgggccttaggcacctcaaggacttttctgctatttactgctcttattgttaaggataataattaaggatcatatgaataattaatgaagatgctgatgactatgaataataaataattatcctgaggaga

SEQ ID NO: 673 - DNA, 3884 bp, Homo sapiens
  source 1..3884: mol_type = genomic DNA
  misc_feature 1..3884: note = cDNA of KCNH2 gene SNP c.2833G>T (p.Gly945Cys)
atgccggtgcggaggggccacgtcgcgccgcagaacaccttcctggacaccatcatccgcaagtttgagggccagagccgtaagttcatcatcgccaacgctcgggtggagaactgcgccgtcatctactgcaacgacggcttctgcgagctgtgcggctactcgcgggccgaggtgatgcagcgaccctgcacctgcgacttcctgcacgggccgcgcacgcagcgccgcgctgccgcgcagatcgcgcaggcactgctgggcgccgaggagcgcaaagtggaaatcgccttctaccggaaagatgggagctgcttcctatgtctggtggatgtggtgcccgtgaagaacgaggatggggctgtcatcatgttcatcctcaatttcgaggtggtgatggagaaggacatggtggggtccccggctcatgacaccaaccaccggggcccccccaccagctggctggccccaggccgcgccaagaccttccgcctgaagctgcccgcgctgctggcgctgacggcccgggagtcgtcggtgcggtcgggcggcgcgggcggcgcgggcgccccgggggccgtggtggtggacgtggacctgacgcccgcggcacccagcagcgagtcgctggccctggacgaagtgacagccatggacaaccacgtggcagggctcgggcccgcggaggagcggcgtgcgctggtgggtcccggctctccgccccgcagcgcgcccggccagctcccatcgccccgggcgcacagcctcaaccccgacgcctcgggctccagctgcagcctggcccggacgcgctcccgagaaagctgcgccagcgtgcgccgcgcctcgtcggccgacgacatcgaggccatgcgcgccggggtgctgcccccgccaccgcgccacgccagcaccggggccatgcacccactgcgcagcggcttgctcaactccacctcggactccgacctcgtgcgctaccgcaccattagcaagattccccaaatcaccctcaactttgtggacctcaagggcgaccccttcttggcttcgcccaccagtgaccgtgagatcatagcacctaagataaaggagcgaacccacaatgtcactgagaaggtcacccaggtcctgtccctgggcgccgacgtgctgcctgagtacaagctgcaggcaccgcgcatccaccgctggaccatcctgcattacagccccttcaaggccgtgtgggactggctcatcctgctgctggtcatctacacggctgtcttcacaccctactcggctgccttcctgctgaaggagacggaagaaggcccgcctgctaccgagtgtggctacgcctgccagccgctggctgtggtggacctcatcgtggacatcatgttcattgtggacatcctcatcaacttccgcaccacctacgtcaatgccaacgaggaggtggtcagccaccccggccgcatcgccgtccactacttcaagggctggttcctcatcgacatggtggccgccatccccttcgacctgctcatcttcggctctggctctgaggagctgatcgggctgctgaagactgcgcggctgctgcggctggtgcgcgtggcgcggaagctggatcgctactcagagtacggcgcggccgtgctgttcttgctcatgtgcacctttgcgctcatcgcgcactggctagcctgcatctggtacgccatcggcaacatggagcagccacacatggactcacgcatcggctggctgcacaacctgggcgaccagataggcaaaccctacaacagcagcggcctgggcggcccctccatcaaggacaagtatgtgacggcgctctacttcaccttcagcagcctcaccagtgtgggcttcggcaacgtctctcccaacaccaactcagagaagatcttctccatctgcgtcatgctcattggctccctcatgtatgctagcatcttcggcaacgtgtcggccatcatccagcggctgtactcgggcacagcccgctaccacacacagatgctgcgggtgcgggagttcatccgcttccaccagatccccaatcccctgcgccagcgcctcgaggagtacttccagcacgcctggtcctacaccaacggcatcgacatgaacgcggtgctgaagggcttccctgagtgcctgcaggctgacatctgcctgcacctgaaccgctcactgctgcagcactgcaaacccttccgaggggccaccaagggctgccttcgggccctggccatgaagttcaagaccacacatgcaccgccaggggacacactggtgcatgctggggacctgctcaccgccctgtacttcatctcccggggctccatcgagatcctgcggggcgacgtcgtcgtggccatcctggggaagaatgacatctttggggagcctctgaacctgtatgcaaggcctggcaagtcgaacggggatgtgcgggccctcacctactgtgacctacacaagatccatcgggacgacctgctggaggtgctggacatgtaccctgagttctccgaccacttctggtccagcctggagatcaccttcaacctgcgagataccaacatgatcccgggctcccccggcagtacggagttagagggtggcttcagtcggcaacgcaagcgcaagttgtccttccgcaggcgcacggacaaggacacggagcagccaggggaggtgtcggccttggggccgggccgggcgggggcagggccgagtagccggggccggccgggggggccgtggggggagagcccgtccagtggcccctccagccctgagagcagtgaggatgagtgcccaggccgcagctccagccccctccgcctggtgcccttctccagccccaggccccccggagagccgccgggtggggagcccctgatggaggactgcgagaagagcagcgacacttgcaaccccctgtcaggcgccttctcaggagtgtccaacattttcagcttctggggggacagtcggggccgccagtaccaggagctccctcgatgccccgcccccacccccagcctcctcaacatccccctctccagcccgggtcggcggccccggggcgacgtggagagcaggctggatgccctccagcgccagctcaacaggctggagacccggctgagtgcagacatggccactgtcctgcagctgctacagaggcagatgacgctggtcccgcccgcctacagtgctgtgaccaccccggggcctggccccacttccacatccccgctgttgcccgtcagccccctccccaccctcaccttggactcgctttctcaggtttcccagttcatggcgtgtgaggagctgcccccgggggccccagagcttccccaagaaggccccacacgacgcctctccctaccgggccagctgggggccctcacctcccagcccctgcacagacacggctcggacccgggcagttagtggggctgcccagtgtggacacgtggctcacccagggatcaaggcgctgctgggccgctccccttggaggccctgctcaggaggccctgaccgtggaaggggagaggaactcgaaagcacagctcctcccccagcccttgggaccatcttctcctgcagtcccctgggccccagtgagaggggcaggggcagggccggcagtaggtggggcctgtggtccccccactgccctgagggcattagctggtctaactgcccggaggcacccggccctgggccttaggcacctcaaggacttttctgctatttactgctcttattgttaaggataataattaaggatcatatgaataattaatgaagatgctgatgactatgaataataaataattatcctgaggaga

SEQ ID NO: 674 - DNA, 3884 bp, Homo sapiens
  source 1..3884: mol_type = genomic DNA
  misc_feature 1..3884: note = cDNA of KCNH2 gene SNP c.2837C>T (p.Pro946Leu)
atgccggtgcggaggggccacgtcgcgccgcagaacaccttcctggacaccatcatccgcaagtttgagggccagagccgtaagttcatcatcgccaacgctcgggtggagaactgcgccgtcatctactgcaacgacggcttctgcgagctgtgcggctactcgcgggccgaggtgatgcagcgaccctgcacctgcgacttcctgcacgggccgcgcacgcagcgccgcgctgccgcgcagatcgcgcaggcactgctgggcgccgaggagcgcaaagtggaaatcgccttctaccggaaagatgggagctgcttcctatgtctggtggatgtggtgcccgtgaagaacgaggatggggctgtcatcatgttcatcctcaatttcgaggtggtgatggagaaggacatggtggggtccccggctcatgacaccaaccaccggggcccccccaccagctggctggccccaggccgcgccaagaccttccgcctgaagctgcccgcgctgctggcgctgacggcccgggagtcgtcggtgcggtcgggcggcgcgggcggcgcgggcgccccgggggccgtggtggtggacgtggacctgacgcccgcggcacccagcagcgagtcgctggccctggacgaagtgacagccatggacaaccacgtggcagggctcgggcccgcggaggagcggcgtgcgctggtgggtcccggctctccgccccgcagcgcgcccggccagctcccatcgccccgggcgcacagcctcaaccccgacgcctcgggctccagctgcagcctggcccggacgcgctcccgagaaagctgcgccagcgtgcgccgcgcctcgtcggccgacgacatcgaggccatgcgcgccggggtgctgcccccgccaccgcgccacgccagcaccggggccatgcacccactgcgcagcggcttgctcaactccacctcggactccgacctcgtgcgctaccgcaccattagcaagattccccaaatcaccctcaactttgtggacctcaagggcgaccccttcttggcttcgcccaccagtgaccgtgagatcatagcacctaagataaaggagcgaacccacaatgtcactgagaaggtcacccaggtcctgtccctgggcgccgacgtgctgcctgagtacaagctgcaggcaccgcgcatccaccgctggaccatcctgcattacagccccttcaaggccgtgtgggactggctcatcctgctgctggtcatctacacggctgtcttcacaccctactcggctgccttcctgctgaaggagacggaagaaggcccgcctgctaccgagtgtggctacgcctgccagccgctggctgtggtggacctcatcgtggacatcatgttcattgtggacatcctcatcaacttccgcaccacctacgtcaatgccaacgaggaggtggtcagccaccccggccgcatcgccgtccactacttcaagggctggttcctcatcgacatggtggccgccatccccttcgacctgctcatcttcggctctggctctgaggagctgatcgggctgctgaagactgcgcggctgctgcggctggtgcgcgtggcgcggaagctggatcgctactcagagtacggcgcggccgtgctgttcttgctcatgtgcacctttgcgctcatcgcgcactggctagcctgcatctggtacgccatcggcaacatggagcagccacacatggactcacgcatcggctggctgcacaacctgggcgaccagataggcaaaccctacaacagcagcggcctgggcggcccctccatcaaggacaagtatgtgacggcgctctacttcaccttcagcagcctcaccagtgtgggcttcggcaacgtctctcccaacaccaactcagagaagatcttctccatctgcgtcatgctcattggctccctcatgtatgctagcatcttcggcaacgtgtcggccatcatccagcggctgtactcgggcacagcccgctaccacacacagatgctgcgggtgcgggagttcatccgcttccaccagatccccaatcccctgcgccagcgcctcgaggagtacttccagcacgcctggtcctacaccaacggcatcgacatgaacgcggtgctgaagggcttccctgagtgcctgcaggctgacatctgcctgcacctgaaccgctcactgctgcagcactgcaaacccttccgaggggccaccaagggctgccttcgggccctggccatgaagttcaagaccacacatgcaccgccaggggacacactggtgcatgctggggacctgctcaccgccctgtacttcatctcccggggctccatcgagatcctgcggggcgacgtcgtcgtggccatcctggggaagaatgacatctttggggagcctctgaacctgtatgcaaggcctggcaagtcgaacggggatgtgcgggccctcacctactgtgacctacacaagatccatcgggacgacctgctggaggtgctggacatgtaccctgagttctccgaccacttctggtccagcctggagatcaccttcaacctgcgagataccaacatgatcccgggctcccccggcagtacggagttagagggtggcttcagtcggcaacgcaagcgcaagttgtccttccgcaggcgcacggacaaggacacggagcagccaggggaggtgtcggccttggggccgggccgggcgggggcagggccgagtagccggggccggccgggggggccgtggggggagagcccgtccagtggcccctccagccctgagagcagtgaggatgagggcctaggccgcagctccagccccctccgcctggtgcccttctccagccccaggccccccggagagccgccgggtggggagcccctgatggaggactgcgagaagagcagcgacacttgcaaccccctgtcaggcgccttctcaggagtgtccaacattttcagcttctggggggacagtcggggccgccagtaccaggagctccctcgatgccccgcccccacccccagcctcctcaacatccccctctccagcccgggtcggcggccccggggcgacgtggagagcaggctggatgccctccagcgccagctcaacaggctggagacccggctgagtgcagacatggccactgtcctgcagctgctacagaggcagatgacgctggtcccgcccgcctacagtgctgtgaccaccccggggcctggccccacttccacatccccgctgttgcccgtcagccccctccccaccctcaccttggactcgctttctcaggtttcccagttcatggcgtgtgaggagctgcccccgggggccccagagcttccccaagaaggccccacacgacgcctctccctaccgggccagctgggggccctcacctcccagcccctgcacagacacggctcggacccgggcagttagtggggctgcccagtgtggacacgtggctcacccagggatcaaggcgctgctgggccgctccccttggaggccctgctcaggaggccctgaccgtggaaggggagaggaactcgaaagcacagctcctcccccagcccttgggaccatcttctcctgcagtcccctgggccccagtgagaggggcaggggcagggccggcagtaggtggggcctgtggtccccccactgccctgagggcattagctggtctaactgcccggaggcacccggccctgggccttaggcacctcaaggacttttctgctatttactgctcttattgttaaggataataattaaggatcatatgaataattaatgaagatgctgatgactatgaataataaataattatcctgaggaga

SEQ ID NO: 675 - DNA, 3884 bp, Homo sapiens
  source 1..3884: mol_type = genomic DNA
  misc_feature 1..3884: note = cDNA of KCNH2 gene SNP c.2842C>A (p.Arg948Ser)
atgccggtgcggaggggccacgtcgcgccgcagaacaccttcctggacaccatcatccgcaagtttgagggccagagccgtaagttcatcatcgccaacgctcgggtggagaactgcgccgtcatctactgcaacgacggcttctgcgagctgtgcggctactcgcgggccgaggtgatgcagcgaccctgcacctgcgacttcctgcacgggccgcgcacgcagcgccgcgctgccgcgcagatcgcgcaggcactgctgggcgccgaggagcgcaaagtggaaatcgccttctaccggaaagatgggagctgcttcctatgtctggtggatgtggtgcccgtgaagaacgaggatggggctgtcatcatgttcatcctcaatttcgaggtggtgatggagaaggacatggtggggtccccggctcatgacaccaaccaccggggcccccccaccagctggctggccccaggccgcgccaagaccttccgcctgaagctgcccgcgctgctggcgctgacggcccgggagtcgtcggtgcggtcgggcggcgcgggcggcgcgggcgccccgggggccgtggtggtggacgtggacctgacgcccgcggcacccagcagcgagtcgctggccctggacgaagtgacagccatggacaaccacgtggcagggctcgggcccgcggaggagcggcgtgcgctggtgggtcccggctctccgccccgcagcgcgcccggccagctcccatcgccccgggcgcacagcctcaaccccgacgcctcgggctccagctgcagcctggcccggacgcgctcccgagaaagctgcgccagcgtgcgccgcgcctcgtcggccgacgacatcgaggccatgcgcgccggggtgctgcccccgccaccgcgccacgccagcaccggggccatgcacccactgcgcagcggcttgctcaactccacctcggactccgacctcgtgcgctaccgcaccattagcaagattccccaaatcaccctcaactttgtggacctcaagggcgaccccttcttggcttcgcccaccagtgaccgtgagatcatagcacctaagataaaggagcgaacccacaatgtcactgagaaggtcacccaggtcctgtccctgggcgccgacgtgctgcctgagtacaagctgcaggcaccgcgcatccaccgctggaccatcctgcattacagccccttcaaggccgtgtgggactggctcatcctgctgctggtcatctacacggctgtcttcacaccctactcggctgccttcctgctgaaggagacggaagaaggcccgcctgctaccgagtgtggctacgcctgccagccgctggctgtggtggacctcatcgtggacatcatgttcattgtggacatcctcatcaacttccgcaccacctacgtcaatgccaacgaggaggtggtcagccaccccggccgcatcgccgtccactacttcaagggctggttcctcatcgacatggtggccgccatccccttcgacctgctcatcttcggctctggctctgaggagctgatcgggctgctgaagactgcgcggctgctgcggctggtgcgcgtggcgcggaagctggatcgctactcagagtacggcgcggccgtgctgttcttgctcatgtgcacctttgcgctcatcgcgcactggctagcctgcatctggtacgccatcggcaacatggagcagccacacatggactcacgcatcggctggctgcacaacctgggcgaccagataggcaaaccctacaacagcagcggcctgggcggcccctccatcaaggacaagtatgtgacggcgctctacttcaccttcagcagcctcaccagtgtgggcttcggcaacgtctctcccaacaccaactcagagaagatcttctccatctgcgtcatgctcattggctccctcatgtatgctagcatcttcggcaacgtgtcggccatcatccagcggctgtactcgggcacagcccgctaccacacacagatgctgcgggtgcgggagttcatccgcttccaccagatccccaatcccctgcgccagcgcctcgaggagtacttccagcacgcctggtcctacaccaacggcatcgacatgaacgcggtgctgaagggcttccctgagtgcctgcaggctgacatctgcctgcacctgaaccgctcactgctgcagcactgcaaacccttccgaggggccaccaagggctgccttcgggccctggccatgaagttcaagaccacacatgcaccgccaggggacacactggtgcatgctggggacctgctcaccgccctgtacttcatctcccggggctccatcgagatcctgcggggcgacgtcgtcgtggccatcctggggaagaatgacatctttggggagcctctgaacctgtatgcaaggcctggcaagtcgaacggggatgtgcgggccctcacctactgtgacctacacaagatccatcgggacgacctgctggaggtgctggacatgtaccctgagttctccgaccacttctggtccagcctggagatcaccttcaacctgcgagataccaacatgatcccgggctcccccggcagtacggagttagagggtggcttcagtcggcaacgcaagcgcaagttgtccttccgcaggcgcacggacaaggacacggagcagccaggggaggtgtcggccttggggccgggccgggcgggggcagggccgagtagccggggccggccgggggggccgtggggggagagcccgtccagtggcccctccagccctgagagcagtgaggatgagggcccaggcagcagctccagccccctccgcctggtgcccttctccagccccaggccccccggagagccgccgggtggggagcccctgatggaggactgcgagaagagcagcgacacttgcaaccccctgtcaggcgccttctcaggagtgtccaacattttcagcttctggggggacagtcggggccgccagtaccaggagctccctcgatgccccgcccccacccccagcctcctcaacatccccctctccagcccgggtcggcggccccggggcgacgtggagagcaggctggatgccctccagcgccagctcaacaggctggagacccggctgagtgcagacatggccactgtcctgcagctgctacagaggcagatgacgctggtcccgcccgcctacagtgctgtgaccaccccggggcctggccccacttccacatccccgctgttgcccgtcagccccctccccaccctcaccttggactcgctttctcaggtttcccagttcatggcgtgtgaggagctgcccccgggggccccagagcttccccaagaaggccccacacgacgcctctccctaccgggccagctgggggccctcacctcccagcccctgcacagacacggctcggacccgggcagttagtggggctgcccagtgtggacacgtggctcacccagggatcaaggcgctgctgggccgctccccttggaggccctgctcaggaggccctgaccgtggaaggggagaggaactcgaaagcacagctcctcccccagcccttgggaccatcttctcctgcagtcccctgggccccagtgagaggggcaggggcagggccggcagtaggtggggcctgtggtccccccactgccctgagggcattagctggtctaactgcccggaggcacccggccctgggccttaggcacctcaaggacttttctgctatttactgctcttattgttaaggataataattaaggatcatatgaataattaatgaagatgctgatgactatgaataataaataattatcctgaggaga

SEQ ID NO: 676 - DNA, 3884 bp, Homo sapiens
  source 1..3884: mol_type = genomic DNA
  misc_feature 1..3884: note = cDNA of KCNH2 gene SNP c.2842C>T (p.Arg948Cys)
atgccggtgcggaggggccacgtcgcgccgcagaacaccttcctggacaccatcatccgcaagtttgagggccagagccgtaagttcatcatcgccaacgctcgggtggagaactgcgccgtcatctactgcaacgacggcttctgcgagctgtgcggctactcgcgggccgaggtgatgcagcgaccctgcacctgcgacttcctgcacgggccgcgcacgcagcgccgcgctgccgcgcagatcgcgcaggcactgctgggcgccgaggagcgcaaagtggaaatcgccttctaccggaaagatgggagctgcttcctatgtctggtggatgtggtgcccgtgaagaacgaggatggggctgtcatcatgttcatcctcaatttcgaggtggtgatggagaaggacatggtggggtccccggctcatgacaccaaccaccggggcccccccaccagctggctggccccaggccgcgccaagaccttccgcctgaagctgcccgcgctgctggcgctgacggcccgggagtcgtcggtgcggtcgggcggcgcgggcggcgcgggcgccccgggggccgtggtggtggacgtggacctgacgcccgcggcacccagcagcgagtcgctggccctggacgaagtgacagccatggacaaccacgtggcagggctcgggcccgcggaggagcggcgtgcgctggtgggtcccggctctccgccccgcagcgcgcccggccagctcccatcgccccgggcgcacagcctcaaccccgacgcctcgggctccagctgcagcctggcccggacgcgctcccgagaaagctgcgccagcgtgcgccgcgcctcgtcggccgacgacatcgaggccatgcgcgccggggtgctgcccccgccaccgcgccacgccagcaccggggccatgcacccactgcgcagcggcttgctcaactccacctcggactccgacctcgtgcgctaccgcaccattagcaagattccccaaatcaccctcaactttgtggacctcaagggcgaccccttcttggcttcgcccaccagtgaccgtgagatcatagcacctaagataaaggagcgaacccacaatgtcactgagaaggtcacccaggtcctgtccctgggcgccgacgtgctgcctgagtacaagctgcaggcaccgcgcatccaccgctggaccatcctgcattacagccccttcaaggccgtgtgggactggctcatcctgctgctggtcatctacacggctgtcttcacaccctactcggctgccttcctgctgaaggagacggaagaaggcccgcctgctaccgagtgtggctacgcctgccagccgctggctgtggtggacctcatcgtggacatcatgttcattgtggacatcctcatcaacttccgcaccacctacgtcaatgccaacgaggaggtggtcagccaccccggccgcatcgccgtccactacttcaagggctggttcctcatcgacatggtggccgccatccccttcgacctgctcatcttcggctctggctctgaggagctgatcgggctgctgaagactgcgcggctgctgcggctggtgcgcgtggcgcggaagctggatcgctactcagagtacggcgcggccgtgctgttcttgctcatgtgcacctttgcgctcatcgcgcactggctagcctgcatctggtacgccatcggcaacatggagcagccacacatggactcacgcatcggctggctgcacaacctgggcgaccagataggcaaaccctacaacagcagcggcctgggcggcccctccatcaaggacaagtatgtgacggcgctctacttcaccttcagcagcctcaccagtgtgggcttcggcaacgtctctcccaacaccaactcagagaagatcttctccatctgcgtcatgctcattggctccctcatgtatgctagcatcttcggcaacgtgtcggccatcatccagcggctgtactcgggcacagcccgctaccacacacagatgctgcgggtgcgggagttcatccgcttccaccagatccccaatcccctgcgccagcgcctcgaggagtacttccagcacgcctggtcctacaccaacggcatcgacatgaacgcggtgctgaagggcttccctgagtgcctgcaggctgacatctgcctgcacctgaaccgctcactgctgcagcactgcaaacccttccgaggggccaccaagggctgccttcgggccctggccatgaagttcaagaccacacatgcaccgccaggggacacactggtgcatgctggggacctgctcaccgccctgtacttcatctcccggggctccatcgagatcctgcggggcgacgtcgtcgtggccatcctggggaagaatgacatctttggggagcctctgaacctgtatgcaaggcctggcaagtcgaacggggatgtgcgggccctcacctactgtgacctacacaagatccatcgggacgacctgctggaggtgctggacatgtaccctgagttctccgaccacttctggtccagcctggagatcaccttcaacctgcgagataccaacatgatcccgggctcccccggcagtacggagttagagggtggcttcagtcggcaacgcaagcgcaagttgtccttccgcaggcgcacggacaaggacacggagcagccaggggaggtgtcggccttggggccgggccgggcgggggcagggccgagtagccggggccggccgggggggccgtggggggagagcccgtccagtggcccctccagccctgagagcagtgaggatgagggcccaggctgcagctccagccccctccgcctggtgcccttctccagccccaggccccccggagagccgccgggtggggagcccctgatggaggactgcgagaagagcagcgacacttgcaaccccctgtcaggcgccttctcaggagtgtccaacattttcagcttctggggggacagtcggggccgccagtaccaggagctccctcgatgccccgcccccacccccagcctcctcaacatccccctctccagcccgggtcggcggccccggggcgacgtggagagcaggctggatgccctccagcgccagctcaacaggctggagacccggctgagtgcagacatggccactgtcctgcagctgctacagaggcagatgacgctggtcccgcccgcctacagtgctgtgaccaccccggggcctggccccacttccacatccccgctgttgcccgtcagccccctccccaccctcaccttggactcgctttctcaggtttcccagttcatggcgtgtgaggagctgcccccgggggccccagagcttccccaagaaggccccacacgacgcctctccctaccgggccagctgggggccctcacctcccagcccctgcacagacacggctcggacccgggcagttagtggggctgcccagtgtggacacgtggctcacccagggatcaaggcgctgctgggccgctccccttggaggccctgctcaggaggccctgaccgtggaaggggagaggaactcgaaagcacagctcctcccccagcccttgggaccatcttctcctgcagtcccctgggccccagtgagaggggcaggggcagggccggcagtaggtggggcctgtggtccccccactgccctgagggcattagctggtctaactgcccggaggcacccggccctgggccttaggcacctcaaggacttttctgctatttactgctcttattgttaaggataataattaaggatcatatgaataattaatgaagatgctgatgactatgaataataaataattatcctgaggaga

SEQ ID NO: 677 - DNA, 3884 bp, Homo sapiens
  source 1..3884: mol_type = genomic DNA
  misc_feature 1..3884: note = cDNA of KCNH2 gene SNP c.2843G>A (p.Arg948His)
atgccggtgcggaggggccacgtcgcgccgcagaacaccttcctggacaccatcatccgcaagtttgagggccagagccgtaagttcatcatcgccaacgctcgggtggagaactgcgccgtcatctactgcaacgacggcttctgcgagctgtgcggctactcgcgggccgaggtgatgcagcgaccctgcacctgcgacttcctgcacgggccgcgcacgcagcgccgcgctgccgcgcagatcgcgcaggcactgctgggcgccgaggagcgcaaagtggaaatcgccttctaccggaaagatgggagctgcttcctatgtctggtggatgtggtgcccgtgaagaacgaggatggggctgtcatcatgttcatcctcaatttcgaggtggtgatggagaaggacatggtggggtccccggctcatgacaccaaccaccggggcccccccaccagctggctggccccaggccgcgccaagaccttccgcctgaagctgcccgcgctgctggcgctgacggcccgggagtcgtcggtgcggtcgggcggcgcgggcggcgcgggcgccccgggggccgtggtggtggacgtggacctgacgcccgcggcacccagcagcgagtcgctggccctggacgaagtgacagccatggacaaccacgtggcagggctcgggcccgcggaggagcggcgtgcgctggtgggtcccggctctccgccccgcagcgcgcccggccagctcccatcgccccgggcgcacagcctcaaccccgacgcctcgggctccagctgcagcctggcccggacgcgctcccgagaaagctgcgccagcgtgcgccgcgcctcgtcggccgacgacatcgaggccatgcgcgccggggtgctgcccccgccaccgcgccacgccagcaccggggccatgcacccactgcgcagcggcttgctcaactccacctcggactccgacctcgtgcgctaccgcaccattagcaagattccccaaatcaccctcaactttgtggacctcaagggcgaccccttcttggcttcgcccaccagtgaccgtgagatcatagcacctaagataaaggagcgaacccacaatgtcactgagaaggtcacccaggtcctgtccctgggcgccgacgtgctgcctgagtacaagctgcaggcaccgcgcatccaccgctggaccatcctgcattacagccccttcaaggccgtgtgggactggctcatcctgctgctggtcatctacacggctgtcttcacaccctactcggctgccttcctgctgaaggagacggaagaaggcccgcctgctaccgagtgtggctacgcctgccagccgctggctgtggtggacctcatcgtggacatcatgttcattgtggacatcctcatcaacttccgcaccacctacgtcaatgccaacgaggaggtggtcagccaccccggccgcatcgccgtccactacttcaagggctggttcctcatcgacatggtggccgccatccccttcgacctgctcatcttcggctctggctctgaggagctgatcgggctgctgaagactgcgcggctgctgcggctggtgcgcgtggcgcggaagctggatcgctactcagagtacggcgcggccgtgctgttcttgctcatgtgcacctttgcgctcatcgcgcactggctagcctgcatctggtacgccatcggcaacatggagcagccacacatggactcacgcatcggctggctgcacaacctgggcgaccagataggcaaaccctacaacagcagcggcctgggcggcccctccatcaaggacaagtatgtgacggcgctctacttcaccttcagcagcctcaccagtgtgggcttcggcaacgtctctcccaacaccaactcagagaagatcttctccatctgcgtcatgctcattggctccctcatgtatgctagcatcttcggcaacgtgtcggccatcatccagcggctgtactcgggcacagcccgctaccacacacagatgctgcgggtgcgggagttcatccgcttccaccagatccccaatcccctgcgccagcgcctcgaggagtacttccagcacgcctggtcctacaccaacggcatcgacatgaacgcggtgctgaagggcttccctgagtgcctgcaggctgacatctgcctgcacctgaaccgctcactgctgcagcactgcaaacccttccgaggggccaccaagggctgccttcgggccctggccatgaagttcaagaccacacatgcaccgccaggggacacactggtgcatgctggggacctgctcaccgccctgtacttcatctcccggggctccatcgagatcctgcggggcgacgtcgtcgtggccatcctggggaagaatgacatctttggggagcctctgaacctgtatgcaaggcctggcaagtcgaacggggatgtgcgggccctcacctactgtgacctacacaagatccatcgggacgacctgctggaggtgctggacatgtaccctgagttctccgaccacttctggtccagcctggagatcaccttcaacctgcgagataccaacatgatcccgggctcccccggcagtacggagttagagggtggcttcagtcggcaacgcaagcgcaagttgtccttccgcaggcgcacggacaaggacacggagcagccaggggaggtgtcggccttggggccgggccgggcgggggcagggccgagtagccggggccggccgggggggccgtggggggagagcccgtccagtggcccctccagccctgagagcagtgaggatgagggcccaggccacagctccagccccctccgcctggtgcccttctccagccccaggccccccggagagccgccgggtggggagcccctgatggaggactgcgagaagagcagcgacacttgcaaccccctgtcaggcgccttctcaggagtgtccaacattttcagcttctggggggacagtcggggccgccagtaccaggagctccctcgatgccccgcccccacccccagcctcctcaacatccccctctccagcccgggtcggcggccccggggcgacgtggagagcaggctggatgccctccagcgccagctcaacaggctggagacccggctgagtgcagacatggccactgtcctgcagctgctacagaggcagatgacgctggtcccgcccgcctacagtgctgtgaccaccccggggcctggccccacttccacatccccgctgttgcccgtcagccccctccccaccctcaccttggactcgctttctcaggtttcccagttcatggcgtgtgaggagctgcccccgggggccccagagcttccccaagaaggccccacacgacgcctctccctaccgggccagctgggggccctcacctcccagcccctgcacagacacggctcggacccgggcagttagtggggctgcccagtgtggacacgtggctcacccagggatcaaggcgctgctgggccgctccccttggaggccctgctcaggaggccctgaccgtggaaggggagaggaactcgaaagcacagctcctcccccagcccttgggaccatcttctcctgcagtcccctgggccccagtgagaggggcaggggcagggccggcagtaggtggggcctgtggtccccccactgccctgagggcattagctggtctaactgcccggaggcacccggccctgggccttaggcacctcaaggacttttctgctatttactgctcttattgttaaggataataattaaggatcatatgaataattaatgaagatgctgatgactatgaataataaataattatcctgaggaga

SEQ ID NO: 678 - DNA, 3884 bp, Homo sapiens
  source 1..3884: mol_type = genomic DNA
  misc_feature 1..3884: note = cDNA of KCNH2 gene SNP c.284A>C (p.Glu95Ala)
atgccggtgcggaggggccacgtcgcgccgcagaacaccttcctggacaccatcatccgcaagtttgagggccagagccgtaagttcatcatcgccaacgctcgggtggagaactgcgccgtcatctactgcaacgacggcttctgcgagctgtgcggctactcgcgggccgaggtgatgcagcgaccctgcacctgcgacttcctgcacgggccgcgcacgcagcgccgcgctgccgcgcagatcgcgcaggcactgctgggcgccgaggagcgcaaagtggcaatcgccttctaccggaaagatgggagctgcttcctatgtctggtggatgtggtgcccgtgaagaacgaggatggggctgtcatcatgttcatcctcaatttcgaggtggtgatggagaaggacatggtggggtccccggctcatgacaccaaccaccggggcccccccaccagctggctggccccaggccgcgccaagaccttccgcctgaagctgcccgcgctgctggcgctgacggcccgggagtcgtcggtgcggtcgggcggcgcgggcggcgcgggcgccccgggggccgtggtggtggacgtggacctgacgcccgcggcacccagcagcgagtcgctggccctggacgaagtgacagccatggacaaccacgtggcagggctcgggcccgcggaggagcggcgtgcgctggtgggtcccggctctccgccccgcagcgcgcccggccagctcccatcgccccgggcgcacagcctcaaccccgacgcctcgggctccagctgcagcctggcccggacgcgctcccgagaaagctgcgccagcgtgcgccgcgcctcgtcggccgacgacatcgaggccatgcgcgccggggtgctgcccccgccaccgcgccacgccagcaccggggccatgcacccactgcgcagcggcttgctcaactccacctcggactccgacctcgtgcgctaccgcaccattagcaagattccccaaatcaccctcaactttgtggacctcaagggcgaccccttcttggcttcgcccaccagtgaccgtgagatcatagcacctaagataaaggagcgaacccacaatgtcactgagaaggtcacccaggtcctgtccctgggcgccgacgtgctgcctgagtacaagctgcaggcaccgcgcatccaccgctggaccatcctgcattacagccccttcaaggccgtgtgggactggctcatcctgctgctggtcatctacacggctgtcttcacaccctactcggctgccttcctgctgaaggagacggaagaaggcccgcctgctaccgagtgtggctacgcctgccagccgctggctgtggtggacctcatcgtggacatcatgttcattgtggacatcctcatcaacttccgcaccacctacgtcaatgccaacgaggaggtggtcagccaccccggccgcatcgccgtccactacttcaagggctggttcctcatcgacatggtggccgccatccccttcgacctgctcatcttcggctctggctctgaggagctgatcgggctgctgaagactgcgcggctgctgcggctggtgcgcgtggcgcggaagctggatcgctactcagagtacggcgcggccgtgctgttcttgctcatgtgcacctttgcgctcatcgcgcactggctagcctgcatctggtacgccatcggcaacatggagcagccacacatggactcacgcatcggctggctgcacaacctgggcgaccagataggcaaaccctacaacagcagcggcctgggcggcccctccatcaaggacaagtatgtgacggcgctctacttcaccttcagcagcctcaccagtgtgggcttcggcaacgtctctcccaacaccaactcagagaagatcttctccatctgcgtcatgctcattggctccctcatgtatgctagcatcttcggcaacgtgtcggccatcatccagcggctgtactcgggcacagcccgctaccacacacagatgctgcgggtgcgggagttcatccgcttccaccagatccccaatcccctgcgccagcgcctcgaggagtacttccagcacgcctggtcctacaccaacggcatcgacatgaacgcggtgctgaagggcttccctgagtgcctgcaggctgacatctgcctgcacctgaaccgctcactgctgcagcactgcaaacccttccgaggggccaccaagggctgccttcgggccctggccatgaagttcaagaccacacatgcaccgccaggggacacactggtgcatgctggggacctgctcaccgccctgtacttcatctcccggggctccatcgagatcctgcggggcgacgtcgtcgtggccatcctggggaagaatgacatctttggggagcctctgaacctgtatgcaaggcctggcaagtcgaacggggatgtgcgggccctcacctactgtgacctacacaagatccatcgggacgacctgctggaggtgctggacatgtaccctgagttctccgaccacttctggtccagcctggagatcaccttcaacctgcgagataccaacatgatcccgggctcccccggcagtacggagttagagggtggcttcagtcggcaacgcaagcgcaagttgtccttccgcaggcgcacggacaaggacacggagcagccaggggaggtgtcggccttggggccgggccgggcgggggcagggccgagtagccggggccggccgggggggccgtggggggagagcccgtccagtggcccctccagccctgagagcagtgaggatgagggcccaggccgcagctccagccccctccgcctggtgcccttctccagccccaggccccccggagagccgccgggtggggagcccctgatggaggactgcgagaagagcagcgacacttgcaaccccctgtcaggcgccttctcaggagtgtccaacattttcagcttctggggggacagtcggggccgccagtaccaggagctccctcgatgccccgcccccacccccagcctcctcaacatccccctctccagcccgggtcggcggccccggggcgacgtggagagcaggctggatgccctccagcgccagctcaacaggctggagacccggctgagtgcagacatggccactgtcctgcagctgctacagaggcagatgacgctggtcccgcccgcctacagtgctgtgaccaccccggggcctggccccacttccacatccccgctgttgcccgtcagccccctccccaccctcaccttggactcgctttctcaggtttcccagttcatggcgtgtgaggagctgcccccgggggccccagagcttccccaagaaggccccacacgacgcctctccctaccgggccagctgggggccctcacctcccagcccctgcacagacacggctcggacccgggcagttagtggggctgcccagtgtggacacgtggctcacccagggatcaaggcgctgctgggccgctccccttggaggccctgctcaggaggccctgaccgtggaaggggagaggaactcgaaagcacagctcctcccccagcccttgggaccatcttctcctgcagtcccctgggccccagtgagaggggcaggggcagggccggcagtaggtggggcctgtggtccccccactgccctgagggcattagctggtctaactgcccggaggcacccggccctgggccttaggcacctcaaggacttttctgctatttactgctcttattgttaaggataataattaaggatcatatgaataattaatgaagatgctgatgactatgaataataaataattatcctgaggaga

SEQ ID NO: 679 - DNA, 3884 bp, Homo sapiens
  source 1..3884: mol_type = genomic DNA
  misc_feature 1..3884: note = cDNA of KCNH2 gene SNP c.2853C>A (p.Ser951Arg)
atgccggtgcggaggggccacgtcgcgccgcagaacaccttcctggacaccatcatccgcaagtttgagggccagagccgtaagttcatcatcgccaacgctcgggtggagaactgcgccgtcatctactgcaacgacggcttctgcgagctgtgcggctactcgcgggccgaggtgatgcagcgaccctgcacctgcgacttcctgcacgggccgcgcacgcagcgccgcgctgccgcgcagatcgcgcaggcactgctgggcgccgaggagcgcaaagtggaaatcgccttctaccggaaagatgggagctgcttcctatgtctggtggatgtggtgcccgtgaagaacgaggatggggctgtcatcatgttcatcctcaatttcgaggtggtgatggagaaggacatggtggggtccccggctcatgacaccaaccaccggggcccccccaccagctggctggccccaggccgcgccaagaccttccgcctgaagctgcccgcgctgctggcgctgacggcccgggagtcgtcggtgcggtcgggcggcgcgggcggcgcgggcgccccgggggccgtggtggtggacgtggacctgacgcccgcggcacccagcagcgagtcgctggccctggacgaagtgacagccatggacaaccacgtggcagggctcgggcccgcggaggagcggcgtgcgctggtgggtcccggctctccgccccgcagcgcgcccggccagctcccatcgccccgggcgcacagcctcaaccccgacgcctcgggctccagctgcagcctggcccggacgcgctcccgagaaagctgcgccagcgtgcgccgcgcctcgtcggccgacgacatcgaggccatgcgcgccggggtgctgcccccgccaccgcgccacgccagcaccggggccatgcacccactgcgcagcggcttgctcaactccacctcggactccgacctcgtgcgctaccgcaccattagcaagattccccaaatcaccctcaactttgtggacctcaagggcgaccccttcttggcttcgcccaccagtgaccgtgagatcatagcacctaagataaaggagcgaacccacaatgtcactgagaaggtcacccaggtcctgtccctgggcgccgacgtgctgcctgagtacaagctgcaggcaccgcgcatccaccgctggaccatcctgcattacagccccttcaaggccgtgtgggactggctcatcctgctgctggtcatctacacggctgtcttcacaccctactcggctgccttcctgctgaaggagacggaagaaggcccgcctgctaccgagtgtggctacgcctgccagccgctggctgtggtggacctcatcgtggacatcatgttcattgtggacatcctcatcaacttccgcaccacctacgtcaatgccaacgaggaggtggtcagccaccccggccgcatcgccgtccactacttcaagggctggttcctcatcgacatggtggccgccatccccttcgacctgctcatcttcggctctggctctgaggagctgatcgggctgctgaagactgcgcggctgctgcggctggtgcgcgtggcgcggaagctggatcgctactcagagtacggcgcggccgtgctgttcttgctcatgtgcacctttgcgctcatcgcgcactggctagcctgcatctggtacgccatcggcaacatggagcagccacacatggactcacgcatcggctggctgcacaacctgggcgaccagataggcaaaccctacaacagcagcggcctgggcggcccctccatcaaggacaagtatgtgacggcgctctacttcaccttcagcagcctcaccagtgtgggcttcggcaacgtctctcccaacaccaactcagagaagatcttctccatctgcgtcatgctcattggctccctcatgtatgctagcatcttcggcaacgtgtcggccatcatccagcggctgtactcgggcacagcccgctaccacacacagatgctgcgggtgcgggagttcatccgcttccaccagatccccaatcccctgcgccagcgcctcgaggagtacttccagcacgcctggtcctacaccaacggcatcgacatgaacgcggtgctgaagggcttccctgagtgcctgcaggctgacatctgcctgcacctgaaccgctcactgctgcagcactgcaaacccttccgaggggccaccaagggctgccttcgggccctggccatgaagttcaagaccacacatgcaccgccaggggacacactggtgcatgctggggacctgctcaccgccctgtacttcatctcccggggctccatcgagatcctgcggggcgacgtcgtcgtggccatcctggggaagaatgacatctttggggagcctctgaacctgtatgcaaggcctggcaagtcgaacggggatgtgcgggccctcacctactgtgacctacacaagatccatcgggacgacctgctggaggtgctggacatgtaccctgagttctccgaccacttctggtccagcctggagatcaccttcaacctgcgagataccaacatgatcccgggctcccccggcagtacggagttagagggtggcttcagtcggcaacgcaagcgcaagttgtccttccgcaggcgcacggacaaggacacggagcagccaggggaggtgtcggccttggggccgggccgggcgggggcagggccgagtagccggggccggccgggggggccgtggggggagagcccgtccagtggcccctccagccctgagagcagtgaggatgagggcccaggccgcagctccagacccctccgcctggtgcccttctccagccccaggccccccggagagccgccgggtggggagcccctgatggaggactgcgagaagagcagcgacacttgcaaccccctgtcaggcgccttctcaggagtgtccaacattttcagcttctggggggacagtcggggccgccagtaccaggagctccctcgatgccccgcccccacccccagcctcctcaacatccccctctccagcccgggtcggcggccccggggcgacgtggagagcaggctggatgccctccagcgccagctcaacaggctggagacccggctgagtgcagacatggccactgtcctgcagctgctacagaggcagatgacgctggtcccgcccgcctacagtgctgtgaccaccccggggcctggccccacttccacatccccgctgttgcccgtcagccccctccccaccctcaccttggactcgctttctcaggtttcccagttcatggcgtgtgaggagctgcccccgggggccccagagcttccccaagaaggccccacacgacgcctctccctaccgggccagctgggggccctcacctcccagcccctgcacagacacggctcggacccgggcagttagtggggctgcccagtgtggacacgtggctcacccagggatcaaggcgctgctgggccgctccccttggaggccctgctcaggaggccctgaccgtggaaggggagaggaactcgaaagcacagctcctcccccagcccttgggaccatcttctcctgcagtcccctgggccccagtgagaggggcaggggcagggccggcagtaggtggggcctgtggtccccccactgccctgagggcattagctggtctaactgcccggaggcacccggccctgggccttaggcacctcaaggacttttctgctatttactgctcttattgttaaggataataattaaggatcatatgaataattaatgaagatgctgatgactatgaataataaataattatcctgaggaga

SEQ ID NO: 680 - DNA, 3884 bp, Homo sapiens
  source 1..3884: mol_type = genomic DNA
  misc_feature 1..3884: note = cDNA of KCNH2 gene SNP c.2854C>T (p.Pro952Ser)
atgccggtgcggaggggccacgtcgcgccgcagaacaccttcctggacaccatcatccgcaagtttgagggccagagccgtaagttcatcatcgccaacgctcgggtggagaactgcgccgtcatctactgcaacgacggcttctgcgagctgtgcggctactcgcgggccgaggtgatgcagcgaccctgcacctgcgacttcctgcacgggccgcgcacgcagcgccgcgctgccgcgcagatcgcgcaggcactgctgggcgccgaggagcgcaaagtggaaatcgccttctaccggaaagatgggagctgcttcctatgtctggtggatgtggtgcccgtgaagaacgaggatggggctgtcatcatgttcatcctcaatttcgaggtggtgatggagaaggacatggtggggtccccggctcatgacaccaaccaccggggcccccccaccagctggctggccccaggccgcgccaagaccttccgcctgaagctgcccgcgctgctggcgctgacggcccgggagtcgtcggtgcggtcgggcggcgcgggcggcgcgggcgccccgggggccgtggtggtggacgtggacctgacgcccgcggcacccagcagcgagtcgctggccctggacgaagtgacagccatggacaaccacgtggcagggctcgggcccgcggaggagcggcgtgcgctggtgggtcccggctctccgccccgcagcgcgcccggccagctcccatcgccccgggcgcacagcctcaaccccgacgcctcgggctccagctgcagcctggcccggacgcgctcccgagaaagctgcgccagcgtgcgccgcgcctcgtcggccgacgacatcgaggccatgcgcgccggggtgctgcccccgccaccgcgccacgccagcaccggggccatgcacccactgcgcagcggcttgctcaactccacctcggactccgacctcgtgcgctaccgcaccattagcaagattccccaaatcaccctcaactttgtggacctcaagggcgaccccttcttggcttcgcccaccagtgaccgtgagatcatagcacctaagataaaggagcgaacccacaatgtcactgagaaggtcacccaggtcctgtccctgggcgccgacgtgctgcctgagtacaagctgcaggcaccgcgcatccaccgctggaccatcctgcattacagccccttcaaggccgtgtgggactggctcatcctgctgctggtcatctacacggctgtcttcacaccctactcggctgccttcctgctgaaggagacggaagaaggcccgcctgctaccgagtgtggctacgcctgccagccgctggctgtggtggacctcatcgtggacatcatgttcattgtggacatcctcatcaacttccgcaccacctacgtcaatgccaacgaggaggtggtcagccaccccggccgcatcgccgtccactacttcaagggctggttcctcatcgacatggtggccgccatccccttcgacctgctcatcttcggctctggctctgaggagctgatcgggctgctgaagactgcgcggctgctgcggctggtgcgcgtggcgcggaagctggatcgctactcagagtacggcgcggccgtgctgttcttgctcatgtgcacctttgcgctcatcgcgcactggctagcctgcatctggtacgccatcggcaacatggagcagccacacatggactcacgcatcggctggctgcacaacctgggcgaccagataggcaaaccctacaacagcagcggcctgggcggcccctccatcaaggacaagtatgtgacggcgctctacttcaccttcagcagcctcaccagtgtgggcttcggcaacgtctctcccaacaccaactcagagaagatcttctccatctgcgtcatgctcattggctccctcatgtatgctagcatcttcggcaacgtgtcggccatcatccagcggctgtactcgggcacagcccgctaccacacacagatgctgcgggtgcgggagttcatccgcttccaccagatccccaatcccctgcgccagcgcctcgaggagtacttccagcacgcctggtcctacaccaacggcatcgacatgaacgcggtgctgaagggcttccctgagtgcctgcaggctgacatctgcctgcacctgaaccgctcactgctgcagcactgcaaacccttccgaggggccaccaagggctgccttcgggccctggccatgaagttcaagaccacacatgcaccgccaggggacacactggtgcatgctggggacctgctcaccgccctgtacttcatctcccggggctccatcgagatcctgcggggcgacgtcgtcgtggccatcctggggaagaatgacatctttggggagcctctgaacctgtatgcaaggcctggcaagtcgaacggggatgtgcgggccctcacctactgtgacctacacaagatccatcgggacgacctgctggaggtgctggacatgtaccctgagttctccgaccacttctggtccagcctggagatcaccttcaacctgcgagataccaacatgatcccgggctcccccggcagtacggagttagagggtggcttcagtcggcaacgcaagcgcaagttgtccttccgcaggcgcacggacaaggacacggagcagccaggggaggtgtcggccttggggccgggccgggcgggggcagggccgagtagccggggccggccgggggggccgtggggggagagcccgtccagtggcccctccagccctgagagcagtgaggatgagggcccaggccgcagctccagctccctccgcctggtgcccttctccagccccaggccccccggagagccgccgggtggggagcccctgatggaggactgcgagaagagcagcgacacttgcaaccccctgtcaggcgccttctcaggagtgtccaacattttcagcttctggggggacagtcggggccgccagtaccaggagctccctcgatgccccgcccccacccccagcctcctcaacatccccctctccagcccgggtcggcggccccggggcgacgtggagagcaggctggatgccctccagcgccagctcaacaggctggagacccggctgagtgcagacatggccactgtcctgcagctgctacagaggcagatgacgctggtcccgcccgcctacagtgctgtgaccaccccggggcctggccccacttccacatccccgctgttgcccgtcagccccctccccaccctcaccttggactcgctttctcaggtttcccagttcatggcgtgtgaggagctgcccccgggggccccagagcttccccaagaaggccccacacgacgcctctccctaccgggccagctgggggccctcacctcccagcccctgcacagacacggctcggacccgggcagttagtggggctgcccagtgtggacacgtggctcacccagggatcaaggcgctgctgggccgctccccttggaggccctgctcaggaggccctgaccgtggaaggggagaggaactcgaaagcacagctcctcccccagcccttgggaccatcttctcctgcagtcccctgggccccagtgagaggggcaggggcagggccggcagtaggtggggcctgtggtccccccactgccctgagggcattagctggtctaactgcccggaggcacccggccctgggccttaggcacctcaaggacttttctgctatttactgctcttattgttaaggataataattaaggatcatatgaataattaatgaagatgctgatgactatgaataataaataattatcctgaggaga

SEQ ID NO: 681 - DNA, 3884 bp, Homo sapiens
  source 1..3884: mol_type = genomic DNA
  misc_feature 1..3884: note = cDNA of KCNH2 gene SNP c.2855C>G (p.Pro952Arg)
atgccggtgcggaggggccacgtcgcgccgcagaacaccttcctggacaccatcatccgcaagtttgagggccagagccgtaagttcatcatcgccaacgctcgggtggagaactgcgccgtcatctactgcaacgacggcttctgcgagctgtgcggctactcgcgggccgaggtgatgcagcgaccctgcacctgcgacttcctgcacgggccgcgcacgcagcgccgcgctgccgcgcagatcgcgcaggcactgctgggcgccgaggagcgcaaagtggaaatcgccttctaccggaaagatgggagctgcttcctatgtctggtggatgtggtgcccgtgaagaacgaggatggggctgtcatcatgttcatcctcaatttcgaggtggtgatggagaaggacatggtggggtccccggctcatgacaccaaccaccggggcccccccaccagctggctggccccaggccgcgccaagaccttccgcctgaagctgcccgcgctgctggcgctgacggcccgggagtcgtcggtgcggtcgggcggcgcgggcggcgcgggcgccccgggggccgtggtggtggacgtggacctgacgcccgcggcacccagcagcgagtcgctggccctggacgaagtgacagccatggacaaccacgtggcagggctcgggcccgcggaggagcggcgtgcgctggtgggtcccggctctccgccccgcagcgcgcccggccagctcccatcgccccgggcgcacagcctcaaccccgacgcctcgggctccagctgcagcctggcccggacgcgctcccgagaaagctgcgccagcgtgcgccgcgcctcgtcggccgacgacatcgaggccatgcgcgccggggtgctgcccccgccaccgcgccacgccagcaccggggccatgcacccactgcgcagcggcttgctcaactccacctcggactccgacctcgtgcgctaccgcaccattagcaagattccccaaatcaccctcaactttgtggacctcaagggcgaccccttcttggcttcgcccaccagtgaccgtgagatcatagcacctaagataaaggagcgaacccacaatgtcactgagaaggtcacccaggtcctgtccctgggcgccgacgtgctgcctgagtacaagctgcaggcaccgcgcatccaccgctggaccatcctgcattacagccccttcaaggccgtgtgggactggctcatcctgctgctggtcatctacacggctgtcttcacaccctactcggctgccttcctgctgaaggagacggaagaaggcccgcctgctaccgagtgtggctacgcctgccagccgctggctgtggtggacctcatcgtggacatcatgttcattgtggacatcctcatcaacttccgcaccacctacgtcaatgccaacgaggaggtggtcagccaccccggccgcatcgccgtccactacttcaagggctggttcctcatcgacatggtggccgccatccccttcgacctgctcatcttcggctctggctctgaggagctgatcgggctgctgaagactgcgcggctgctgcggctggtgcgcgtggcgcggaagctggatcgctactcagagtacggcgcggccgtgctgttcttgctcatgtgcacctttgcgctcatcgcgcactggctagcctgcatctggtacgccatcggcaacatggagcagccacacatggactcacgcatcggctggctgcacaacctgggcgaccagataggcaaaccctacaacagcagcggcctgggcggcccctccatcaaggacaagtatgtgacggcgctctacttcaccttcagcagcctcaccagtgtgggcttcggcaacgtctctcccaacaccaactcagagaagatcttctccatctgcgtcatgctcattggctccctcatgtatgctagcatcttcggcaacgtgtcggccatcatccagcggctgtactcgggcacagcccgctaccacacacagatgctgcgggtgcgggagttcatccgcttccaccagatccccaatcccctgcgccagcgcctcgaggagtacttccagcacgcctggtcctacaccaacggcatcgacatgaacgcggtgctgaagggcttccctgagtgcctgcaggctgacatctgcctgcacctgaaccgctcactgctgcagcactgcaaacccttccgaggggccaccaagggctgccttcgggccctggccatgaagttcaagaccacacatgcaccgccaggggacacactggtgcatgctggggacctgctcaccgccctgtacttcatctcccggggctccatcgagatcctgcggggcgacgtcgtcgtggccatcctggggaagaatgacatctttggggagcctctgaacctgtatgcaaggcctggcaagtcgaacggggatgtgcgggccctcacctactgtgacctacacaagatccatcgggacgacctgctggaggtgctggacatgtaccctgagttctccgaccacttctggtccagcctggagatcaccttcaacctgcgagataccaacatgatcccgggctcccccggcagtacggagttagagggtggcttcagtcggcaacgcaagcgcaagttgtccttccgcaggcgcacggacaaggacacggagcagccaggggaggtgtcggccttggggccgggccgggcgggggcagggccgagtagccggggccggccgggggggccgtggggggagagcccgtccagtggcccctccagccctgagagcagtgaggatgagggcccaggccgcagctccagccgcctccgcctggtgcccttctccagccccaggccccccggagagccgccgggtggggagcccctgatggaggactgcgagaagagcagcgacacttgcaaccccctgtcaggcgccttctcaggagtgtccaacattttcagcttctggggggacagtcggggccgccagtaccaggagctccctcgatgccccgcccccacccccagcctcctcaacatccccctctccagcccgggtcggcggccccggggcgacgtggagagcaggctggatgccctccagcgccagctcaacaggctggagacccggctgagtgcagacatggccactgtcctgcagctgctacagaggcagatgacgctggtcccgcccgcctacagtgctgtgaccaccccggggcctggccccacttccacatccccgctgttgcccgtcagccccctccccaccctcaccttggactcgctttctcaggtttcccagttcatggcgtgtgaggagctgcccccgggggccccagagcttccccaagaaggccccacacgacgcctctccctaccgggccagctgggggccctcacctcccagcccctgcacagacacggctcggacccgggcagttagtggggctgcccagtgtggacacgtggctcacccagggatcaaggcgctgctgggccgctccccttggaggccctgctcaggaggccctgaccgtggaaggggagaggaactcgaaagcacagctcctcccccagcccttgggaccatcttctcctgcagtcccctgggccccagtgagaggggcaggggcagggccggcagtaggtggggcctgtggtccccccactgccctgagggcattagctggtctaactgcccggaggcacccggccctgggccttaggcacctcaaggacttttctgctatttactgctcttattgttaaggataataattaaggatcatatgaataattaatgaagatgctgatgactatgaataataaataattatcctgaggaga

SEQ ID NO: 682 - DNA, 3884 bp, Homo sapiens
  source 1..3884: mol_type = genomic DNA
  misc_feature 1..3884: note = cDNA of KCNH2 gene SNP c.2855C>T (p.Pro952Leu)
atgccggtgcggaggggccacgtcgcgccgcagaacaccttcctggacaccatcatccgcaagtttgagggccagagccgtaagttcatcatcgccaacgctcgggtggagaactgcgccgtcatctactgcaacgacggcttctgcgagctgtgcggctactcgcgggccgaggtgatgcagcgaccctgcacctgcgacttcctgcacgggccgcgcacgcagcgccgcgctgccgcgcagatcgcgcaggcactgctgggcgccgaggagcgcaaagtggaaatcgccttctaccggaaagatgggagctgcttcctatgtctggtggatgtggtgcccgtgaagaacgaggatggggctgtcatcatgttcatcctcaatttcgaggtggtgatggagaaggacatggtggggtccccggctcatgacaccaaccaccggggcccccccaccagctggctggccccaggccgcgccaagaccttccgcctgaagctgcccgcgctgctggcgctgacggcccgggagtcgtcggtgcggtcgggcggcgcgggcggcgcgggcgccccgggggccgtggtggtggacgtggacctgacgcccgcggcacccagcagcgagtcgctggccctggacgaagtgacagccatggacaaccacgtggcagggctcgggcccgcggaggagcggcgtgcgctggtgggtcccggctctccgccccgcagcgcgcccggccagctcccatcgccccgggcgcacagcctcaaccccgacgcctcgggctccagctgcagcctggcccggacgcgctcccgagaaagctgcgccagcgtgcgccgcgcctcgtcggccgacgacatcgaggccatgcgcgccggggtgctgcccccgccaccgcgccacgccagcaccggggccatgcacccactgcgcagcggcttgctcaactccacctcggactccgacctcgtgcgctaccgcaccattagcaagattccccaaatcaccctcaactttgtggacctcaagggcgaccccttcttggcttcgcccaccagtgaccgtgagatcatagcacctaagataaaggagcgaacccacaatgtcactgagaaggtcacccaggtcctgtccctgggcgccgacgtgctgcctgagtacaagctgcaggcaccgcgcatccaccgctggaccatcctgcattacagccccttcaaggccgtgtgggactggctcatcctgctgctggtcatctacacggctgtcttcacaccctactcggctgccttcctgctgaaggagacggaagaaggcccgcctgctaccgagtgtggctacgcctgccagccgctggctgtggtggacctcatcgtggacatcatgttcattgtggacatcctcatcaacttccgcaccacctacgtcaatgccaacgaggaggtggtcagccaccccggccgcatcgccgtccactacttcaagggctggttcctcatcgacatggtggccgccatccccttcgacctgctcatcttcggctctggctctgaggagctgatcgggctgctgaagactgcgcggctgctgcggctggtgcgcgtggcgcggaagctggatcgctactcagagtacggcgcggccgtgctgttcttgctcatgtgcacctttgcgctcatcgcgcactggctagcctgcatctggtacgccatcggcaacatggagcagccacacatggactcacgcatcggctggctgcacaacctgggcgaccagataggcaaaccctacaacagcagcggcctgggcggcccctccatcaaggacaagtatgtgacggcgctctacttcaccttcagcagcctcaccagtgtgggcttcggcaacgtctctcccaacaccaactcagagaagatcttctccatctgcgtcatgctcattggctccctcatgtatgctagcatcttcggcaacgtgtcggccatcatccagcggctgtactcgggcacagcccgctaccacacacagatgctgcgggtgcgggagttcatccgcttccaccagatccccaatcccctgcgccagcgcctcgaggagtacttccagcacgcctggtcctacaccaacggcatcgacatgaacgcggtgctgaagggcttccctgagtgcctgcaggctgacatctgcctgcacctgaaccgctcactgctgcagcactgcaaacccttccgaggggccaccaagggctgccttcgggccctggccatgaagttcaagaccacacatgcaccgccaggggacacactggtgcatgctggggacctgctcaccgccctgtacttcatctcccggggctccatcgagatcctgcggggcgacgtcgtcgtggccatcctggggaagaatgacatctttggggagcctctgaacctgtatgcaaggcctggcaagtcgaacggggatgtgcgggccctcacctactgtgacctacacaagatccatcgggacgacctgctggaggtgctggacatgtaccctgagttctccgaccacttctggtccagcctggagatcaccttcaacctgcgagataccaacatgatcccgggctcccccggcagtacggagttagagggtggcttcagtcggcaacgcaagcgcaagttgtccttccgcaggcgcacggacaaggacacggagcagccaggggaggtgtcggccttggggccgggccgggcgggggcagggccgagtagccggggccggccgggggggccgtggggggagagcccgtccagtggcccctccagccctgagagcagtgaggatgagggcccaggccgcagctccagcctcctccgcctggtgcccttctccagccccaggccccccggagagccgccgggtggggagcccctgatggaggactgcgagaagagcagcgacacttgcaaccccctgtcaggcgccttctcaggagtgtccaacattttcagcttctggggggacagtcggggccgccagtaccaggagctccctcgatgccccgcccccacccccagcctcctcaacatccccctctccagcccgggtcggcggccccggggcgacgtggagagcaggctggatgccctccagcgccagctcaacaggctggagacccggctgagtgcagacatggccactgtcctgcagctgctacagaggcagatgacgctggtcccgcccgcctacagtgctgtgaccaccccggggcctggccccacttccacatccccgctgttgcccgtcagccccctccccaccctcaccttggactcgctttctcaggtttcccagttcatggcgtgtgaggagctgcccccgggggccccagagcttccccaagaaggccccacacgacgcctctccctaccgggccagctgggggccctcacctcccagcccctgcacagacacggctcggacccgggcagttagtggggctgcccagtgtggacacgtggctcacccagggatcaaggcgctgctgggccgctccccttggaggccctgctcaggaggccctgaccgtggaaggggagaggaactcgaaagcacagctcctcccccagcccttgggaccatcttctcctgcagtcccctgggccccagtgagaggggcaggggcagggccggcagtaggtggggcctgtggtccccccactgccctgagggcattagctggtctaactgcccggaggcacccggccctgggccttaggcacctcaaggacttttctgctatttactgctcttattgttaaggataataattaaggatcatatgaataattaatgaagatgctgatgactatgaataataaataattatcctgaggaga

SEQ ID NO: 683 - DNA, 3884 bp, Homo sapiens
  source 1..3884: mol_type = genomic DNA
  misc_feature 1..3884: note = cDNA of KCNH2 gene SNP c.2857C>T (p.Leu953Phe)
atgccggtgcggaggggccacgtcgcgccgcagaacaccttcctggacaccatcatccgcaagtttgagggccagagccgtaagttcatcatcgccaacgctcgggtggagaactgcgccgtcatctactgcaacgacggcttctgcgagctgtgcggctactcgcgggccgaggtgatgcagcgaccctgcacctgcgacttcctgcacgggccgcgcacgcagcgccgcgctgccgcgcagatcgcgcaggcactgctgggcgccgaggagcgcaaagtggaaatcgccttctaccggaaagatgggagctgcttcctatgtctggtggatgtggtgcccgtgaagaacgaggatggggctgtcatcatgttcatcctcaatttcgaggtggtgatggagaaggacatggtggggtccccggctcatgacaccaaccaccggggcccccccaccagctggctggccccaggccgcgccaagaccttccgcctgaagctgcccgcgctgctggcgctgacggcccgggagtcgtcggtgcggtcgggcggcgcgggcggcgcgggcgccccgggggccgtggtggtggacgtggacctgacgcccgcggcacccagcagcgagtcgctggccctggacgaagtgacagccatggacaaccacgtggcagggctcgggcccgcggaggagcggcgtgcgctggtgggtcccggctctccgccccgcagcgcgcccggccagctcccatcgccccgggcgcacagcctcaaccccgacgcctcgggctccagctgcagcctggcccggacgcgctcccgagaaagctgcgccagcgtgcgccgcgcctcgtcggccgacgacatcgaggccatgcgcgccggggtgctgcccccgccaccgcgccacgccagcaccggggccatgcacccactgcgcagcggcttgctcaactccacctcggactccgacctcgtgcgctaccgcaccattagcaagattccccaaatcaccctcaactttgtggacctcaagggcgaccccttcttggcttcgcccaccagtgaccgtgagatcatagcacctaagataaaggagcgaacccacaatgtcactgagaaggtcacccaggtcctgtccctgggcgccgacgtgctgcctgagtacaagctgcaggcaccgcgcatccaccgctggaccatcctgcattacagccccttcaaggccgtgtgggactggctcatcctgctgctggtcatctacacggctgtcttcacaccctactcggctgccttcctgctgaaggagacggaagaaggcccgcctgctaccgagtgtggctacgcctgccagccgctggctgtggtggacctcatcgtggacatcatgttcattgtggacatcctcatcaacttccgcaccacctacgtcaatgccaacgaggaggtggtcagccaccccggccgcatcgccgtccactacttcaagggctggttcctcatcgacatggtggccgccatccccttcgacctgctcatcttcggctctggctctgaggagctgatcgggctgctgaagactgcgcggctgctgcggctggtgcgcgtggcgcggaagctggatcgctactcagagtacggcgcggccgtgctgttcttgctcatgtgcacctttgcgctcatcgcgcactggctagcctgcatctggtacgccatcggcaacatggagcagccacacatggactcacgcatcggctggctgcacaacctgggcgaccagataggcaaaccctacaacagcagcggcctgggcggcccctccatcaaggacaagtatgtgacggcgctctacttcaccttcagcagcctcaccagtgtgggcttcggcaacgtctctcccaacaccaactcagagaagatcttctccatctgcgtcatgctcattggctccctcatgtatgctagcatcttcggcaacgtgtcggccatcatccagcggctgtactcgggcacagcccgctaccacacacagatgctgcgggtgcgggagttcatccgcttccaccagatccccaatcccctgcgccagcgcctcgaggagtacttccagcacgcctggtcctacaccaacggcatcgacatgaacgcggtgctgaagggcttccctgagtgcctgcaggctgacatctgcctgcacctgaaccgctcactgctgcagcactgcaaacccttccgaggggccaccaagggctgccttcgggccctggccatgaagttcaagaccacacatgcaccgccaggggacacactggtgcatgctggggacctgctcaccgccctgtacttcatctcccggggctccatcgagatcctgcggggcgacgtcgtcgtggccatcctggggaagaatgacatctttggggagcctctgaacctgtatgcaaggcctggcaagtcgaacggggatgtgcgggccctcacctactgtgacctacacaagatccatcgggacgacctgctggaggtgctggacatgtaccctgagttctccgaccacttctggtccagcctggagatcaccttcaacctgcgagataccaacatgatcccgggctcccccggcagtacggagttagagggtggcttcagtcggcaacgcaagcgcaagttgtccttccgcaggcgcacggacaaggacacggagcagccaggggaggtgtcggccttggggccgggccgggcgggggcagggccgagtagccggggccggccgggggggccgtggggggagagcccgtccagtggcccctccagccctgagagcagtgaggatgagggcccaggccgcagctccagccccttccgcctggtgcccttctccagccccaggccccccggagagccgccgggtggggagcccctgatggaggactgcgagaagagcagcgacacttgcaaccccctgtcaggcgccttctcaggagtgtccaacattttcagcttctggggggacagtcggggccgccagtaccaggagctccctcgatgccccgcccccacccccagcctcctcaacatccccctctccagcccgggtcggcggccccggggcgacgtggagagcaggctggatgccctccagcgccagctcaacaggctggagacccggctgagtgcagacatggccactgtcctgcagctgctacagaggcagatgacgctggtcccgcccgcctacagtgctgtgaccaccccggggcctggccccacttccacatccccgctgttgcccgtcagccccctccccaccctcaccttggactcgctttctcaggtttcccagttcatggcgtgtgaggagctgcccccgggggccccagagcttccccaagaaggccccacacgacgcctctccctaccgggccagctgggggccctcacctcccagcccctgcacagacacggctcggacccgggcagttagtggggctgcccagtgtggacacgtggctcacccagggatcaaggcgctgctgggccgctccccttggaggccctgctcaggaggccctgaccgtggaaggggagaggaactcgaaagcacagctcctcccccagcccttgggaccatcttctcctgcagtcccctgggccccagtgagaggggcaggggcagggccggcagtaggtggggcctgtggtccccccactgccctgagggcattagctggtctaactgcccggaggcacccggccctgggccttaggcacctcaaggacttttctgctatttactgctcttattgttaaggataataattaaggatcatatgaataattaatgaagatgctgatgactatgaataataaataattatcctgaggaga

SEQ ID NO: 684 - DNA, 3884 bp, Homo sapiens
  source 1..3884: mol_type = genomic DNA
  misc_feature 1..3884: note = cDNA of KCNH2 gene SNP c.2860C>T (p.Arg954Cys)
atgccggtgcggaggggccacgtcgcgccgcagaacaccttcctggacaccatcatccgcaagtttgagggccagagccgtaagttcatcatcgccaacgctcgggtggagaactgcgccgtcatctactgcaacgacggcttctgcgagctgtgcggctactcgcgggccgaggtgatgcagcgaccctgcacctgcgacttcctgcacgggccgcgcacgcagcgccgcgctgccgcgcagatcgcgcaggcactgctgggcgccgaggagcgcaaagtggaaatcgccttctaccggaaagatgggagctgcttcctatgtctggtggatgtggtgcccgtgaagaacgaggatggggctgtcatcatgttcatcctcaatttcgaggtggtgatggagaaggacatggtggggtccccggctcatgacaccaaccaccggggcccccccaccagctggctggccccaggccgcgccaagaccttccgcctgaagctgcccgcgctgctggcgctgacggcccgggagtcgtcggtgcggtcgggcggcgcgggcggcgcgggcgccccgggggccgtggtggtggacgtggacctgacgcccgcggcacccagcagcgagtcgctggccctggacgaagtgacagccatggacaaccacgtggcagggctcgggcccgcggaggagcggcgtgcgctggtgggtcccggctctccgccccgcagcgcgcccggccagctcccatcgccccgggcgcacagcctcaaccccgacgcctcgggctccagctgcagcctggcccggacgcgctcccgagaaagctgcgccagcgtgcgccgcgcctcgtcggccgacgacatcgaggccatgcgcgccggggtgctgcccccgccaccgcgccacgccagcaccggggccatgcacccactgcgcagcggcttgctcaactccacctcggactccgacctcgtgcgctaccgcaccattagcaagattccccaaatcaccctcaactttgtggacctcaagggcgaccccttcttggcttcgcccaccagtgaccgtgagatcatagcacctaagataaaggagcgaacccacaatgtcactgagaaggtcacccaggtcctgtccctgggcgccgacgtgctgcctgagtacaagctgcaggcaccgcgcatccaccgctggaccatcctgcattacagccccttcaaggccgtgtgggactggctcatcctgctgctggtcatctacacggctgtcttcacaccctactcggctgccttcctgctgaaggagacggaagaaggcccgcctgctaccgagtgtggctacgcctgccagccgctggctgtggtggacctcatcgtggacatcatgttcattgtggacatcctcatcaacttccgcaccacctacgtcaatgccaacgaggaggtggtcagccaccccggccgcatcgccgtccactacttcaagggctggttcctcatcgacatggtggccgccatccccttcgacctgctcatcttcggctctggctctgaggagctgatcgggctgctgaagactgcgcggctgctgcggctggtgcgcgtggcgcggaagctggatcgctactcagagtacggcgcggccgtgctgttcttgctcatgtgcacctttgcgctcatcgcgcactggctagcctgcatctggtacgccatcggcaacatggagcagccacacatggactcacgcatcggctggctgcacaacctgggcgaccagataggcaaaccctacaacagcagcggcctgggcggcccctccatcaaggacaagtatgtgacggcgctctacttcaccttcagcagcctcaccagtgtgggcttcggcaacgtctctcccaacaccaactcagagaagatcttctccatctgcgtcatgctcattggctccctcatgtatgctagcatcttcggcaacgtgtcggccatcatccagcggctgtactcgggcacagcccgctaccacacacagatgctgcgggtgcgggagttcatccgcttccaccagatccccaatcccctgcgccagcgcctcgaggagtacttccagcacgcctggtcctacaccaacggcatcgacatgaacgcggtgctgaagggcttccctgagtgcctgcaggctgacatctgcctgcacctgaaccgctcactgctgcagcactgcaaacccttccgaggggccaccaagggctgccttcgggccctggccatgaagttcaagaccacacatgcaccgccaggggacacactggtgcatgctggggacctgctcaccgccctgtacttcatctcccggggctccatcgagatcctgcggggcgacgtcgtcgtggccatcctggggaagaatgacatctttggggagcctctgaacctgtatgcaaggcctggcaagtcgaacggggatgtgcgggccctcacctactgtgacctacacaagatccatcgggacgacctgctggaggtgctggacatgtaccctgagttctccgaccacttctggtccagcctggagatcaccttcaacctgcgagataccaacatgatcccgggctcccccggcagtacggagttagagggtggcttcagtcggcaacgcaagcgcaagttgtccttccgcaggcgcacggacaaggacacggagcagccaggggaggtgtcggccttggggccgggccgggcgggggcagggccgagtagccggggccggccgggggggccgtggggggagagcccgtccagtggcccctccagccctgagagcagtgaggatgagggcccaggccgcagctccagccccctctgcctggtgcccttctccagccccaggccccccggagagccgccgggtggggagcccctgatggaggactgcgagaagagcagcgacacttgcaaccccctgtcaggcgccttctcaggagtgtccaacattttcagcttctggggggacagtcggggccgccagtaccaggagctccctcgatgccccgcccccacccccagcctcctcaacatccccctctccagcccgggtcggcggccccggggcgacgtggagagcaggctggatgccctccagcgccagctcaacaggctggagacccggctgagtgcagacatggccactgtcctgcagctgctacagaggcagatgacgctggtcccgcccgcctacagtgctgtgaccaccccggggcctggccccacttccacatccccgctgttgcccgtcagccccctccccaccctcaccttggactcgctttctcaggtttcccagttcatggcgtgtgaggagctgcccccgggggccccagagcttccccaagaaggccccacacgacgcctctccctaccgggccagctgggggccctcacctcccagcccctgcacagacacggctcggacccgggcagttagtggggctgcccagtgtggacacgtggctcacccagggatcaaggcgctgctgggccgctccccttggaggccctgctcaggaggccctgaccgtggaaggggagaggaactcgaaagcacagctcctcccccagcccttgggaccatcttctcctgcagtcccctgggccccagtgagaggggcaggggcagggccggcagtaggtggggcctgtggtccccccactgccctgagggcattagctggtctaactgcccggaggcacccggccctgggccttaggcacctcaaggacttttctgctatttactgctcttattgttaaggataataattaaggatcatatgaataattaatgaagatgctgatgactatgaataataaataattatcctgaggaga

SEQ ID NO: 685 - DNA, 3884 bp, Homo sapiens
  source 1..3884: mol_type = genomic DNA
  misc_feature 1..3884: note = cDNA of KCNH2 gene SNP c.2861G>A (p.Arg954His)
atgccggtgcggaggggccacgtcgcgccgcagaacaccttcctggacaccatcatccgcaagtttgagggccagagccgtaagttcatcatcgccaacgctcgggtggagaactgcgccgtcatctactgcaacgacggcttctgcgagctgtgcggctactcgcgggccgaggtgatgcagcgaccctgcacctgcgacttcctgcacgggccgcgcacgcagcgccgcgctgccgcgcagatcgcgcaggcactgctgggcgccgaggagcgcaaagtggaaatcgccttctaccggaaagatgggagctgcttcctatgtctggtggatgtggtgcccgtgaagaacgaggatggggctgtcatcatgttcatcctcaatttcgaggtggtgatggagaaggacatggtggggtccccggctcatgacaccaaccaccggggcccccccaccagctggctggccccaggccgcgccaagaccttccgcctgaagctgcccgcgctgctggcgctgacggcccgggagtcgtcggtgcggtcgggcggcgcgggcggcgcgggcgccccgggggccgtggtggtggacgtggacctgacgcccgcggcacccagcagcgagtcgctggccctggacgaagtgacagccatggacaaccacgtggcagggctcgggcccgcggaggagcggcgtgcgctggtgggtcccggctctccgccccgcagcgcgcccggccagctcccatcgccccgggcgcacagcctcaaccccgacgcctcgggctccagctgcagcctggcccggacgcgctcccgagaaagctgcgccagcgtgcgccgcgcctcgtcggccgacgacatcgaggccatgcgcgccggggtgctgcccccgccaccgcgccacgccagcaccggggccatgcacccactgcgcagcggcttgctcaactccacctcggactccgacctcgtgcgctaccgcaccattagcaagattccccaaatcaccctcaactttgtggacctcaagggcgaccccttcttggcttcgcccaccagtgaccgtgagatcatagcacctaagataaaggagcgaacccacaatgtcactgagaaggtcacccaggtcctgtccctgggcgccgacgtgctgcctgagtacaagctgcaggcaccgcgcatccaccgctggaccatcctgcattacagccccttcaaggccgtgtgggactggctcatcctgctgctggtcatctacacggctgtcttcacaccctactcggctgccttcctgctgaaggagacggaagaaggcccgcctgctaccgagtgtggctacgcctgccagccgctggctgtggtggacctcatcgtggacatcatgttcattgtggacatcctcatcaacttccgcaccacctacgtcaatgccaacgaggaggtggtcagccaccccggccgcatcgccgtccactacttcaagggctggttcctcatcgacatggtggccgccatccccttcgacctgctcatcttcggctctggctctgaggagctgatcgggctgctgaagactgcgcggctgctgcggctggtgcgcgtggcgcggaagctggatcgctactcagagtacggcgcggccgtgctgttcttgctcatgtgcacctttgcgctcatcgcgcactggctagcctgcatctggtacgccatcggcaacatggagcagccacacatggactcacgcatcggctggctgcacaacctgggcgaccagataggcaaaccctacaacagcagcggcctgggcggcccctccatcaaggacaagtatgtgacggcgctctacttcaccttcagcagcctcaccagtgtgggcttcggcaacgtctctcccaacaccaactcagagaagatcttctccatctgcgtcatgctcattggctccctcatgtatgctagcatcttcggcaacgtgtcggccatcatccagcggctgtactcgggcacagcccgctaccacacacagatgctgcgggtgcgggagttcatccgcttccaccagatccccaatcccctgcgccagcgcctcgaggagtacttccagcacgcctggtcctacaccaacggcatcgacatgaacgcggtgctgaagggcttccctgagtgcctgcaggctgacatctgcctgcacctgaaccgctcactgctgcagcactgcaaacccttccgaggggccaccaagggctgccttcgggccctggccatgaagttcaagaccacacatgcaccgccaggggacacactggtgcatgctggggacctgctcaccgccctgtacttcatctcccggggctccatcgagatcctgcggggcgacgtcgtcgtggccatcctggggaagaatgacatctttggggagcctctgaacctgtatgcaaggcctggcaagtcgaacggggatgtgcgggccctcacctactgtgacctacacaagatccatcgggacgacctgctggaggtgctggacatgtaccctgagttctccgaccacttctggtccagcctggagatcaccttcaacctgcgagataccaacatgatcccgggctcccccggcagtacggagttagagggtggcttcagtcggcaacgcaagcgcaagttgtccttccgcaggcgcacggacaaggacacggagcagccaggggaggtgtcggccttggggccgggccgggcgggggcagggccgagtagccggggccggccgggggggccgtggggggagagcccgtccagtggcccctccagccctgagagcagtgaggatgagggcccaggccgcagctccagccccctccacctggtgcccttctccagccccaggccccccggagagccgccgggtggggagcccctgatggaggactgcgagaagagcagcgacacttgcaaccccctgtcaggcgccttctcaggagtgtccaacattttcagcttctggggggacagtcggggccgccagtaccaggagctccctcgatgccccgcccccacccccagcctcctcaacatccccctctccagcccgggtcggcggccccggggcgacgtggagagcaggctggatgccctccagcgccagctcaacaggctggagacccggctgagtgcagacatggccactgtcctgcagctgctacagaggcagatgacgctggtcccgcccgcctacagtgctgtgaccaccccggggcctggccccacttccacatccccgctgttgcccgtcagccccctccccaccctcaccttggactcgctttctcaggtttcccagttcatggcgtgtgaggagctgcccccgggggccccagagcttccccaagaaggccccacacgacgcctctccctaccgggccagctgggggccctcacctcccagcccctgcacagacacggctcggacccgggcagttagtggggctgcccagtgtggacacgtggctcacccagggatcaaggcgctgctgggccgctccccttggaggccctgctcaggaggccctgaccgtggaaggggagaggaactcgaaagcacagctcctcccccagcccttgggaccatcttctcctgcagtcccctgggccccagtgagaggggcaggggcagggccggcagtaggtggggcctgtggtccccccactgccctgagggcattagctggtctaactgcccggaggcacccggccctgggccttaggcacctcaaggacttttctgctatttactgctcttattgttaaggataataattaaggatcatatgaataattaatgaagatgctgatgactatgaataataaataattatcctgaggaga

SEQ ID NO: 686 - DNA, 3884 bp, Homo sapiens
  source 1..3884: mol_type = genomic DNA
  misc_feature 1..3884: note = cDNA of KCNH2 gene SNP c.2863C>G (p.Leu955Val)
atgccggtgcggaggggccacgtcgcgccgcagaacaccttcctggacaccatcatccgcaagtttgagggccagagccgtaagttcatcatcgccaacgctcgggtggagaactgcgccgtcatctactgcaacgacggcttctgcgagctgtgcggctactcgcgggccgaggtgatgcagcgaccctgcacctgcgacttcctgcacgggccgcgcacgcagcgccgcgctgccgcgcagatcgcgcaggcactgctgggcgccgaggagcgcaaagtggaaatcgccttctaccggaaagatgggagctgcttcctatgtctggtggatgtggtgcccgtgaagaacgaggatggggctgtcatcatgttcatcctcaatttcgaggtggtgatggagaaggacatggtggggtccccggctcatgacaccaaccaccggggcccccccaccagctggctggccccaggccgcgccaagaccttccgcctgaagctgcccgcgctgctggcgctgacggcccgggagtcgtcggtgcggtcgggcggcgcgggcggcgcgggcgccccgggggccgtggtggtggacgtggacctgacgcccgcggcacccagcagcgagtcgctggccctggacgaagtgacagccatggacaaccacgtggcagggctcgggcccgcggaggagcggcgtgcgctggtgggtcccggctctccgccccgcagcgcgcccggccagctcccatcgccccgggcgcacagcctcaaccccgacgcctcgggctccagctgcagcctggcccggacgcgctcccgagaaagctgcgccagcgtgcgccgcgcctcgtcggccgacgacatcgaggccatgcgcgccggggtgctgcccccgccaccgcgccacgccagcaccggggccatgcacccactgcgcagcggcttgctcaactccacctcggactccgacctcgtgcgctaccgcaccattagcaagattccccaaatcaccctcaactttgtggacctcaagggcgaccccttcttggcttcgcccaccagtgaccgtgagatcatagcacctaagataaaggagcgaacccacaatgtcactgagaaggtcacccaggtcctgtccctgggcgccgacgtgctgcctgagtacaagctgcaggcaccgcgcatccaccgctggaccatcctgcattacagccccttcaaggccgtgtgggactggctcatcctgctgctggtcatctacacggctgtcttcacaccctactcggctgccttcctgctgaaggagacggaagaaggcccgcctgctaccgagtgtggctacgcctgccagccgctggctgtggtggacctcatcgtggacatcatgttcattgtggacatcctcatcaacttccgcaccacctacgtcaatgccaacgaggaggtggtcagccaccccggccgcatcgccgtccactacttcaagggctggttcctcatcgacatggtggccgccatccccttcgacctgctcatcttcggctctggctctgaggagctgatcgggctgctgaagactgcgcggctgctgcggctggtgcgcgtggcgcggaagctggatcgctactcagagtacggcgcggccgtgctgttcttgctcatgtgcacctttgcgctcatcgcgcactggctagcctgcatctggtacgccatcggcaacatggagcagccacacatggactcacgcatcggctggctgcacaacctgggcgaccagataggcaaaccctacaacagcagcggcctgggcggcccctccatcaaggacaagtatgtgacggcgctctacttcaccttcagcagcctcaccagtgtgggcttcggcaacgtctctcccaacaccaactcagagaagatcttctccatctgcgtcatgctcattggctccctcatgtatgctagcatcttcggcaacgtgtcggccatcatccagcggctgtactcgggcacagcccgctaccacacacagatgctgcgggtgcgggagttcatccgcttccaccagatccccaatcccctgcgccagcgcctcgaggagtacttccagcacgcctggtcctacaccaacggcatcgacatgaacgcggtgctgaagggcttccctgagtgcctgcaggctgacatctgcctgcacctgaaccgctcactgctgcagcactgcaaacccttccgaggggccaccaagggctgccttcgggccctggccatgaagttcaagaccacacatgcaccgccaggggacacactggtgcatgctggggacctgctcaccgccctgtacttcatctcccggggctccatcgagatcctgcggggcgacgtcgtcgtggccatcctggggaagaatgacatctttggggagcctctgaacctgtatgcaaggcctggcaagtcgaacggggatgtgcgggccctcacctactgtgacctacacaagatccatcgggacgacctgctggaggtgctggacatgtaccctgagttctccgaccacttctggtccagcctggagatcaccttcaacctgcgagataccaacatgatcccgggctcccccggcagtacggagttagagggtggcttcagtcggcaacgcaagcgcaagttgtccttccgcaggcgcacggacaaggacacggagcagccaggggaggtgtcggccttggggccgggccgggcgggggcagggccgagtagccggggccggccgggggggccgtggggggagagcccgtccagtggcccctccagccctgagagcagtgaggatgagggcccaggccgcagctccagccccctccgcgtggtgcccttctccagccccaggccccccggagagccgccgggtggggagcccctgatggaggactgcgagaagagcagcgacacttgcaaccccctgtcaggcgccttctcaggagtgtccaacattttcagcttctggggggacagtcggggccgccagtaccaggagctccctcgatgccccgcccccacccccagcctcctcaacatccccctctccagcccgggtcggcggccccggggcgacgtggagagcaggctggatgccctccagcgccagctcaacaggctggagacccggctgagtgcagacatggccactgtcctgcagctgctacagaggcagatgacgctggtcccgcccgcctacagtgctgtgaccaccccggggcctggccccacttccacatccccgctgttgcccgtcagccccctccccaccctcaccttggactcgctttctcaggtttcccagttcatggcgtgtgaggagctgcccccgggggccccagagcttccccaagaaggccccacacgacgcctctccctaccgggccagctgggggccctcacctcccagcccctgcacagacacggctcggacccgggcagttagtggggctgcccagtgtggacacgtggctcacccagggatcaaggcgctgctgggccgctccccttggaggccctgctcaggaggccctgaccgtggaaggggagaggaactcgaaagcacagctcctcccccagcccttgggaccatcttctcctgcagtcccctgggccccagtgagaggggcaggggcagggccggcagtaggtggggcctgtggtccccccactgccctgagggcattagctggtctaactgcccggaggcacccggccctgggccttaggcacctcaaggacttttctgctatttactgctcttattgttaaggataataattaaggatcatatgaataattaatgaagatgctgatgactatgaataataaataattatcctgaggaga

SEQ ID NO: 687 - DNA, 3884 bp, Homo sapiens
  source 1..3884: mol_type = genomic DNA
  misc_feature 1..3884: note = cDNA of KCNH2 gene SNP c.286A>G (p.Ile96Val)
atgccggtgcggaggggccacgtcgcgccgcagaacaccttcctggacaccatcatccgcaagtttgagggccagagccgtaagttcatcatcgccaacgctcgggtggagaactgcgccgtcatctactgcaacgacggcttctgcgagctgtgcggctactcgcgggccgaggtgatgcagcgaccctgcacctgcgacttcctgcacgggccgcgcacgcagcgccgcgctgccgcgcagatcgcgcaggcactgctgggcgccgaggagcgcaaagtggaagtcgccttctaccggaaagatgggagctgcttcctatgtctggtggatgtggtgcccgtgaagaacgaggatggggctgtcatcatgttcatcctcaatttcgaggtggtgatggagaaggacatggtggggtccccggctcatgacaccaaccaccggggcccccccaccagctggctggccccaggccgcgccaagaccttccgcctgaagctgcccgcgctgctggcgctgacggcccgggagtcgtcggtgcggtcgggcggcgcgggcggcgcgggcgccccgggggccgtggtggtggacgtggacctgacgcccgcggcacccagcagcgagtcgctggccctggacgaagtgacagccatggacaaccacgtggcagggctcgggcccgcggaggagcggcgtgcgctggtgggtcccggctctccgccccgcagcgcgcccggccagctcccatcgccccgggcgcacagcctcaaccccgacgcctcgggctccagctgcagcctggcccggacgcgctcccgagaaagctgcgccagcgtgcgccgcgcctcgtcggccgacgacatcgaggccatgcgcgccggggtgctgcccccgccaccgcgccacgccagcaccggggccatgcacccactgcgcagcggcttgctcaactccacctcggactccgacctcgtgcgctaccgcaccattagcaagattccccaaatcaccctcaactttgtggacctcaagggcgaccccttcttggcttcgcccaccagtgaccgtgagatcatagcacctaagataaaggagcgaacccacaatgtcactgagaaggtcacccaggtcctgtccctgggcgccgacgtgctgcctgagtacaagctgcaggcaccgcgcatccaccgctggaccatcctgcattacagccccttcaaggccgtgtgggactggctcatcctgctgctggtcatctacacggctgtcttcacaccctactcggctgccttcctgctgaaggagacggaagaaggcccgcctgctaccgagtgtggctacgcctgccagccgctggctgtggtggacctcatcgtggacatcatgttcattgtggacatcctcatcaacttccgcaccacctacgtcaatgccaacgaggaggtggtcagccaccccggccgcatcgccgtccactacttcaagggctggttcctcatcgacatggtggccgccatccccttcgacctgctcatcttcggctctggctctgaggagctgatcgggctgctgaagactgcgcggctgctgcggctggtgcgcgtggcgcggaagctggatcgctactcagagtacggcgcggccgtgctgttcttgctcatgtgcacctttgcgctcatcgcgcactggctagcctgcatctggtacgccatcggcaacatggagcagccacacatggactcacgcatcggctggctgcacaacctgggcgaccagataggcaaaccctacaacagcagcggcctgggcggcccctccatcaaggacaagtatgtgacggcgctctacttcaccttcagcagcctcaccagtgtgggcttcggcaacgtctctcccaacaccaactcagagaagatcttctccatctgcgtcatgctcattggctccctcatgtatgctagcatcttcggcaacgtgtcggccatcatccagcggctgtactcgggcacagcccgctaccacacacagatgctgcgggtgcgggagttcatccgcttccaccagatccccaatcccctgcgccagcgcctcgaggagtacttccagcacgcctggtcctacaccaacggcatcgacatgaacgcggtgctgaagggcttccctgagtgcctgcaggctgacatctgcctgcacctgaaccgctcactgctgcagcactgcaaacccttccgaggggccaccaagggctgccttcgggccctggccatgaagttcaagaccacacatgcaccgccaggggacacactggtgcatgctggggacctgctcaccgccctgtacttcatctcccggggctccatcgagatcctgcggggcgacgtcgtcgtggccatcctggggaagaatgacatctttggggagcctctgaacctgtatgcaaggcctggcaagtcgaacggggatgtgcgggccctcacctactgtgacctacacaagatccatcgggacgacctgctggaggtgctggacatgtaccctgagttctccgaccacttctggtccagcctggagatcaccttcaacctgcgagataccaacatgatcccgggctcccccggcagtacggagttagagggtggcttcagtcggcaacgcaagcgcaagttgtccttccgcaggcgcacggacaaggacacggagcagccaggggaggtgtcggccttggggccgggccgggcgggggcagggccgagtagccggggccggccgggggggccgtggggggagagcccgtccagtggcccctccagccctgagagcagtgaggatgagggcccaggccgcagctccagccccctccgcctggtgcccttctccagccccaggccccccggagagccgccgggtggggagcccctgatggaggactgcgagaagagcagcgacacttgcaaccccctgtcaggcgccttctcaggagtgtccaacattttcagcttctggggggacagtcggggccgccagtaccaggagctccctcgatgccccgcccccacccccagcctcctcaacatccccctctccagcccgggtcggcggccccggggcgacgtggagagcaggctggatgccctccagcgccagctcaacaggctggagacccggctgagtgcagacatggccactgtcctgcagctgctacagaggcagatgacgctggtcccgcccgcctacagtgctgtgaccaccccggggcctggccccacttccacatccccgctgttgcccgtcagccccctccccaccctcaccttggactcgctttctcaggtttcccagttcatggcgtgtgaggagctgcccccgggggccccagagcttccccaagaaggccccacacgacgcctctccctaccgggccagctgggggccctcacctcccagcccctgcacagacacggctcggacccgggcagttagtggggctgcccagtgtggacacgtggctcacccagggatcaaggcgctgctgggccgctccccttggaggccctgctcaggaggccctgaccgtggaaggggagaggaactcgaaagcacagctcctcccccagcccttgggaccatcttctcctgcagtcccctgggccccagtgagaggggcaggggcagggccggcagtaggtggggcctgtggtccccccactgccctgagggcattagctggtctaactgcccggaggcacccggccctgggccttaggcacctcaaggacttttctgctatttactgctcttattgttaaggataataattaaggatcatatgaataattaatgaagatgctgatgactatgaataataaataattatcctgaggaga

SEQ ID NO: 688 - DNA, 3884 bp, Homo sapiens
  source 1..3884: mol_type = genomic DNA
  misc_feature 1..3884: note = cDNA of KCNH2 gene SNP c.2870C>T (p.Pro957Leu)
atgccggtgcggaggggccacgtcgcgccgcagaacaccttcctggacaccatcatccgcaagtttgagggccagagccgtaagttcatcatcgccaacgctcgggtggagaactgcgccgtcatctactgcaacgacggcttctgcgagctgtgcggctactcgcgggccgaggtgatgcagcgaccctgcacctgcgacttcctgcacgggccgcgcacgcagcgccgcgctgccgcgcagatcgcgcaggcactgctgggcgccgaggagcgcaaagtggaaatcgccttctaccggaaagatgggagctgcttcctatgtctggtggatgtggtgcccgtgaagaacgaggatggggctgtcatcatgttcatcctcaatttcgaggtggtgatggagaaggacatggtggggtccccggctcatgacaccaaccaccggggcccccccaccagctggctggccccaggccgcgccaagaccttccgcctgaagctgcccgcgctgctggcgctgacggcccgggagtcgtcggtgcggtcgggcggcgcgggcggcgcgggcgccccgggggccgtggtggtggacgtggacctgacgcccgcggcacccagcagcgagtcgctggccctggacgaagtgacagccatggacaaccacgtggcagggctcgggcccgcggaggagcggcgtgcgctggtgggtcccggctctccgccccgcagcgcgcccggccagctcccatcgccccgggcgcacagcctcaaccccgacgcctcgggctccagctgcagcctggcccggacgcgctcccgagaaagctgcgccagcgtgcgccgcgcctcgtcggccgacgacatcgaggccatgcgcgccggggtgctgcccccgccaccgcgccacgccagcaccggggccatgcacccactgcgcagcggcttgctcaactccacctcggactccgacctcgtgcgctaccgcaccattagcaagattccccaaatcaccctcaactttgtggacctcaagggcgaccccttcttggcttcgcccaccagtgaccgtgagatcatagcacctaagataaaggagcgaacccacaatgtcactgagaaggtcacccaggtcctgtccctgggcgccgacgtgctgcctgagtacaagctgcaggcaccgcgcatccaccgctggaccatcctgcattacagccccttcaaggccgtgtgggactggctcatcctgctgctggtcatctacacggctgtcttcacaccctactcggctgccttcctgctgaaggagacggaagaaggcccgcctgctaccgagtgtggctacgcctgccagccgctggctgtggtggacctcatcgtggacatcatgttcattgtggacatcctcatcaacttccgcaccacctacgtcaatgccaacgaggaggtggtcagccaccccggccgcatcgccgtccactacttcaagggctggttcctcatcgacatggtggccgccatccccttcgacctgctcatcttcggctctggctctgaggagctgatcgggctgctgaagactgcgcggctgctgcggctggtgcgcgtggcgcggaagctggatcgctactcagagtacggcgcggccgtgctgttcttgctcatgtgcacctttgcgctcatcgcgcactggctagcctgcatctggtacgccatcggcaacatggagcagccacacatggactcacgcatcggctggctgcacaacctgggcgaccagataggcaaaccctacaacagcagcggcctgggcggcccctccatcaaggacaagtatgtgacggcgctctacttcaccttcagcagcctcaccagtgtgggcttcggcaacgtctctcccaacaccaactcagagaagatcttctccatctgcgtcatgctcattggctccctcatgtatgctagcatcttcggcaacgtgtcggccatcatccagcggctgtactcgggcacagcccgctaccacacacagatgctgcgggtgcgggagttcatccgcttccaccagatccccaatcccctgcgccagcgcctcgaggagtacttccagcacgcctggtcctacaccaacggcatcgacatgaacgcggtgctgaagggcttccctgagtgcctgcaggctgacatctgcctgcacctgaaccgctcactgctgcagcactgcaaacccttccgaggggccaccaagggctgccttcgggccctggccatgaagttcaagaccacacatgcaccgccaggggacacactggtgcatgctggggacctgctcaccgccctgtacttcatctcccggggctccatcgagatcctgcggggcgacgtcgtcgtggccatcctggggaagaatgacatctttggggagcctctgaacctgtatgcaaggcctggcaagtcgaacggggatgtgcgggccctcacctactgtgacctacacaagatccatcgggacgacctgctggaggtgctggacatgtaccctgagttctccgaccacttctggtccagcctggagatcaccttcaacctgcgagataccaacatgatcccgggctcccccggcagtacggagttagagggtggcttcagtcggcaacgcaagcgcaagttgtccttccgcaggcgcacggacaaggacacggagcagccaggggaggtgtcggccttggggccgggccgggcgggggcagggccgagtagccggggccggccgggggggccgtggggggagagcccgtccagtggcccctccagccctgagagcagtgaggatgagggcccaggccgcagctccagccccctccgcctggtgctcttctccagccccaggccccccggagagccgccgggtggggagcccctgatggaggactgcgagaagagcagcgacacttgcaaccccctgtcaggcgccttctcaggagtgtccaacattttcagcttctggggggacagtcggggccgccagtaccaggagctccctcgatgccccgcccccacccccagcctcctcaacatccccctctccagcccgggtcggcggccccggggcgacgtggagagcaggctggatgccctccagcgccagctcaacaggctggagacccggctgagtgcagacatggccactgtcctgcagctgctacagaggcagatgacgctggtcccgcccgcctacagtgctgtgaccaccccggggcctggccccacttccacatccccgctgttgcccgtcagccccctccccaccctcaccttggactcgctttctcaggtttcccagttcatggcgtgtgaggagctgcccccgggggccccagagcttccccaagaaggccccacacgacgcctctccctaccgggccagctgggggccctcacctcccagcccctgcacagacacggctcggacccgggcagttagtggggctgcccagtgtggacacgtggctcacccagggatcaaggcgctgctgggccgctccccttggaggccctgctcaggaggccctgaccgtggaaggggagaggaactcgaaagcacagctcctcccccagcccttgggaccatcttctcctgcagtcccctgggccccagtgagaggggcaggggcagggccggcagtaggtggggcctgtggtccccccactgccctgagggcattagctggtctaactgcccggaggcacccggccctgggccttaggcacctcaaggacttttctgctatttactgctcttattgttaaggataataattaaggatcatatgaataattaatgaagatgctgatgactatgaataataaataattatcctgaggaga

SEQ ID NO: 689 - DNA, 3884 bp, Homo sapiens
  source 1..3884: mol_type = genomic DNA
  misc_feature 1..3884: note = cDNA of KCNH2 gene SNP c.2875T>A (p.Ser959Thr)
atgccggtgcggaggggccacgtcgcgccgcagaacaccttcctggacaccatcatccgcaagtttgagggccagagccgtaagttcatcatcgccaacgctcgggtggagaactgcgccgtcatctactgcaacgacggcttctgcgagctgtgcggctactcgcgggccgaggtgatgcagcgaccctgcacctgcgacttcctgcacgggccgcgcacgcagcgccgcgctgccgcgcagatcgcgcaggcactgctgggcgccgaggagcgcaaagtggaaatcgccttctaccggaaagatgggagctgcttcctatgtctggtggatgtggtgcccgtgaagaacgaggatggggctgtcatcatgttcatcctcaatttcgaggtggtgatggagaaggacatggtggggtccccggctcatgacaccaaccaccggggcccccccaccagctggctggccccaggccgcgccaagaccttccgcctgaagctgcccgcgctgctggcgctgacggcccgggagtcgtcggtgcggtcgggcggcgcgggcggcgcgggcgccccgggggccgtggtggtggacgtggacctgacgcccgcggcacccagcagcgagtcgctggccctggacgaagtgacagccatggacaaccacgtggcagggctcgggcccgcggaggagcggcgtgcgctggtgggtcccggctctccgccccgcagcgcgcccggccagctcccatcgccccgggcgcacagcctcaaccccgacgcctcgggctccagctgcagcctggcccggacgcgctcccgagaaagctgcgccagcgtgcgccgcgcctcgtcggccgacgacatcgaggccatgcgcgccggggtgctgcccccgccaccgcgccacgccagcaccggggccatgcacccactgcgcagcggcttgctcaactccacctcggactccgacctcgtgcgctaccgcaccattagcaagattccccaaatcaccctcaactttgtggacctcaagggcgaccccttcttggcttcgcccaccagtgaccgtgagatcatagcacctaagataaaggagcgaacccacaatgtcactgagaaggtcacccaggtcctgtccctgggcgccgacgtgctgcctgagtacaagctgcaggcaccgcgcatccaccgctggaccatcctgcattacagccccttcaaggccgtgtgggactggctcatcctgctgctggtcatctacacggctgtcttcacaccctactcggctgccttcctgctgaaggagacggaagaaggcccgcctgctaccgagtgtggctacgcctgccagccgctggctgtggtggacctcatcgtggacatcatgttcattgtggacatcctcatcaacttccgcaccacctacgtcaatgccaacgaggaggtggtcagccaccccggccgcatcgccgtccactacttcaagggctggttcctcatcgacatggtggccgccatccccttcgacctgctcatcttcggctctggctctgaggagctgatcgggctgctgaagactgcgcggctgctgcggctggtgcgcgtggcgcggaagctggatcgctactcagagtacggcgcggccgtgctgttcttgctcatgtgcacctttgcgctcatcgcgcactggctagcctgcatctggtacgccatcggcaacatggagcagccacacatggactcacgcatcggctggctgcacaacctgggcgaccagataggcaaaccctacaacagcagcggcctgggcggcccctccatcaaggacaagtatgtgacggcgctctacttcaccttcagcagcctcaccagtgtgggcttcggcaacgtctctcccaacaccaactcagagaagatcttctccatctgcgtcatgctcattggctccctcatgtatgctagcatcttcggcaacgtgtcggccatcatccagcggctgtactcgggcacagcccgctaccacacacagatgctgcgggtgcgggagttcatccgcttccaccagatccccaatcccctgcgccagcgcctcgaggagtacttccagcacgcctggtcctacaccaacggcatcgacatgaacgcggtgctgaagggcttccctgagtgcctgcaggctgacatctgcctgcacctgaaccgctcactgctgcagcactgcaaacccttccgaggggccaccaagggctgccttcgggccctggccatgaagttcaagaccacacatgcaccgccaggggacacactggtgcatgctggggacctgctcaccgccctgtacttcatctcccggggctccatcgagatcctgcggggcgacgtcgtcgtggccatcctggggaagaatgacatctttggggagcctctgaacctgtatgcaaggcctggcaagtcgaacggggatgtgcgggccctcacctactgtgacctacacaagatccatcgggacgacctgctggaggtgctggacatgtaccctgagttctccgaccacttctggtccagcctggagatcaccttcaacctgcgagataccaacatgatcccgggctcccccggcagtacggagttagagggtggcttcagtcggcaacgcaagcgcaagttgtccttccgcaggcgcacggacaaggacacggagcagccaggggaggtgtcggccttggggccgggccgggcgggggcagggccgagtagccggggccggccgggggggccgtggggggagagcccgtccagtggcccctccagccctgagagcagtgaggatgagggcccaggccgcagctccagccccctccgcctggtgcccttcaccagccccaggccccccggagagccgccgggtggggagcccctgatggaggactgcgagaagagcagcgacacttgcaaccccctgtcaggcgccttctcaggagtgtccaacattttcagcttctggggggacagtcggggccgccagtaccaggagctccctcgatgccccgcccccacccccagcctcctcaacatccccctctccagcccgggtcggcggccccggggcgacgtggagagcaggctggatgccctccagcgccagctcaacaggctggagacccggctgagtgcagacatggccactgtcctgcagctgctacagaggcagatgacgctggtcccgcccgcctacagtgctgtgaccaccccggggcctggccccacttccacatccccgctgttgcccgtcagccccctccccaccctcaccttggactcgctttctcaggtttcccagttcatggcgtgtgaggagctgcccccgggggccccagagcttccccaagaaggccccacacgacgcctctccctaccgggccagctgggggccctcacctcccagcccctgcacagacacggctcggacccgggcagttagtggggctgcccagtgtggacacgtggctcacccagggatcaaggcgctgctgggccgctccccttggaggccctgctcaggaggccctgaccgtggaaggggagaggaactcgaaagcacagctcctcccccagcccttgggaccatcttctcctgcagtcccctgggccccagtgagaggggcaggggcagggccggcagtaggtggggcctgtggtccccccactgccctgagggcattagctggtctaactgcccggaggcacccggccctgggccttaggcacctcaaggacttttctgctatttactgctcttattgttaaggataataattaaggatcatatgaataattaatgaagatgctgatgactatgaataataaataattatcctgaggaga

SEQ ID NO: 690 - DNA, 3884 bp, Homo sapiens
  source 1..3884: mol_type = genomic DNA
  misc_feature 1..3884: note = cDNA of KCNH2 gene SNP c.2876C>G (p.Ser959Cys)
atgccggtgcggaggggccacgtcgcgccgcagaacaccttcctggacaccatcatccgcaagtttgagggccagagccgtaagttcatcatcgccaacgctcgggtggagaactgcgccgtcatctactgcaacgacggcttctgcgagctgtgcggctactcgcgggccgaggtgatgcagcgaccctgcacctgcgacttcctgcacgggccgcgcacgcagcgccgcgctgccgcgcagatcgcgcaggcactgctgggcgccgaggagcgcaaagtggaaatcgccttctaccggaaagatgggagctgcttcctatgtctggtggatgtggtgcccgtgaagaacgaggatggggctgtcatcatgttcatcctcaatttcgaggtggtgatggagaaggacatggtggggtccccggctcatgacaccaaccaccggggcccccccaccagctggctggccccaggccgcgccaagaccttccgcctgaagctgcccgcgctgctggcgctgacggcccgggagtcgtcggtgcggtcgggcggcgcgggcggcgcgggcgccccgggggccgtggtggtggacgtggacctgacgcccgcggcacccagcagcgagtcgctggccctggacgaagtgacagccatggacaaccacgtggcagggctcgggcccgcggaggagcggcgtgcgctggtgggtcccggctctccgccccgcagcgcgcccggccagctcccatcgccccgggcgcacagcctcaaccccgacgcctcgggctccagctgcagcctggcccggacgcgctcccgagaaagctgcgccagcgtgcgccgcgcctcgtcggccgacgacatcgaggccatgcgcgccggggtgctgcccccgccaccgcgccacgccagcaccggggccatgcacccactgcgcagcggcttgctcaactccacctcggactccgacctcgtgcgctaccgcaccattagcaagattccccaaatcaccctcaactttgtggacctcaagggcgaccccttcttggcttcgcccaccagtgaccgtgagatcatagcacctaagataaaggagcgaacccacaatgtcactgagaaggtcacccaggtcctgtccctgggcgccgacgtgctgcctgagtacaagctgcaggcaccgcgcatccaccgctggaccatcctgcattacagccccttcaaggccgtgtgggactggctcatcctgctgctggtcatctacacggctgtcttcacaccctactcggctgccttcctgctgaaggagacggaagaaggcccgcctgctaccgagtgtggctacgcctgccagccgctggctgtggtggacctcatcgtggacatcatgttcattgtggacatcctcatcaacttccgcaccacctacgtcaatgccaacgaggaggtggtcagccaccccggccgcatcgccgtccactacttcaagggctggttcctcatcgacatggtggccgccatccccttcgacctgctcatcttcggctctggctctgaggagctgatcgggctgctgaagactgcgcggctgctgcggctggtgcgcgtggcgcggaagctggatcgctactcagagtacggcgcggccgtgctgttcttgctcatgtgcacctttgcgctcatcgcgcactggctagcctgcatctggtacgccatcggcaacatggagcagccacacatggactcacgcatcggctggctgcacaacctgggcgaccagataggcaaaccctacaacagcagcggcctgggcggcccctccatcaaggacaagtatgtgacggcgctctacttcaccttcagcagcctcaccagtgtgggcttcggcaacgtctctcccaacaccaactcagagaagatcttctccatctgcgtcatgctcattggctccctcatgtatgctagcatcttcggcaacgtgtcggccatcatccagcggctgtactcgggcacagcccgctaccacacacagatgctgcgggtgcgggagttcatccgcttccaccagatccccaatcccctgcgccagcgcctcgaggagtacttccagcacgcctggtcctacaccaacggcatcgacatgaacgcggtgctgaagggcttccctgagtgcctgcaggctgacatctgcctgcacctgaaccgctcactgctgcagcactgcaaacccttccgaggggccaccaagggctgccttcgggccctggccatgaagttcaagaccacacatgcaccgccaggggacacactggtgcatgctggggacctgctcaccgccctgtacttcatctcccggggctccatcgagatcctgcggggcgacgtcgtcgtggccatcctggggaagaatgacatctttggggagcctctgaacctgtatgcaaggcctggcaagtcgaacggggatgtgcgggccctcacctactgtgacctacacaagatccatcgggacgacctgctggaggtgctggacatgtaccctgagttctccgaccacttctggtccagcctggagatcaccttcaacctgcgagataccaacatgatcccgggctcccccggcagtacggagttagagggtggcttcagtcggcaacgcaagcgcaagttgtccttccgcaggcgcacggacaaggacacggagcagccaggggaggtgtcggccttggggccgggccgggcgggggcagggccgagtagccggggccggccgggggggccgtggggggagagcccgtccagtggcccctccagccctgagagcagtgaggatgagggcccaggccgcagctccagccccctccgcctggtgcccttctgcagccccaggccccccggagagccgccgggtggggagcccctgatggaggactgcgagaagagcagcgacacttgcaaccccctgtcaggcgccttctcaggagtgtccaacattttcagcttctggggggacagtcggggccgccagtaccaggagctccctcgatgccccgcccccacccccagcctcctcaacatccccctctccagcccgggtcggcggccccggggcgacgtggagagcaggctggatgccctccagcgccagctcaacaggctggagacccggctgagtgcagacatggccactgtcctgcagctgctacagaggcagatgacgctggtcccgcccgcctacagtgctgtgaccaccccggggcctggccccacttccacatccccgctgttgcccgtcagccccctccccaccctcaccttggactcgctttctcaggtttcccagttcatggcgtgtgaggagctgcccccgggggccccagagcttccccaagaaggccccacacgacgcctctccctaccgggccagctgggggccctcacctcccagcccctgcacagacacggctcggacccgggcagttagtggggctgcccagtgtggacacgtggctcacccagggatcaaggcgctgctgggccgctccccttggaggccctgctcaggaggccctgaccgtggaaggggagaggaactcgaaagcacagctcctcccccagcccttgggaccatcttctcctgcagtcccctgggccccagtgagaggggcaggggcagggccggcagtaggtggggcctgtggtccccccactgccctgagggcattagctggtctaactgcccggaggcacccggccctgggccttaggcacctcaaggacttttctgctatttactgctcttattgttaaggataataattaaggatcatatgaataattaatgaagatgctgatgactatgaataataaataattatcctgaggaga

SEQ ID NO: 691 - DNA, 3884 bp, Homo sapiens
  source 1..3884: mol_type = genomic DNA
  misc_feature 1..3884: note = cDNA of KCNH2 gene SNP c.2876C>T (p.Ser959Phe)
atgccggtgcggaggggccacgtcgcgccgcagaacaccttcctggacaccatcatccgcaagtttgagggccagagccgtaagttcatcatcgccaacgctcgggtggagaactgcgccgtcatctactgcaacgacggcttctgcgagctgtgcggctactcgcgggccgaggtgatgcagcgaccctgcacctgcgacttcctgcacgggccgcgcacgcagcgccgcgctgccgcgcagatcgcgcaggcactgctgggcgccgaggagcgcaaagtggaaatcgccttctaccggaaagatgggagctgcttcctatgtctggtggatgtggtgcccgtgaagaacgaggatggggctgtcatcatgttcatcctcaatttcgaggtggtgatggagaaggacatggtggggtccccggctcatgacaccaaccaccggggcccccccaccagctggctggccccaggccgcgccaagaccttccgcctgaagctgcccgcgctgctggcgctgacggcccgggagtcgtcggtgcggtcgggcggcgcgggcggcgcgggcgccccgggggccgtggtggtggacgtggacctgacgcccgcggcacccagcagcgagtcgctggccctggacgaagtgacagccatggacaaccacgtggcagggctcgggcccgcggaggagcggcgtgcgctggtgggtcccggctctccgccccgcagcgcgcccggccagctcccatcgccccgggcgcacagcctcaaccccgacgcctcgggctccagctgcagcctggcccggacgcgctcccgagaaagctgcgccagcgtgcgccgcgcctcgtcggccgacgacatcgaggccatgcgcgccggggtgctgcccccgccaccgcgccacgccagcaccggggccatgcacccactgcgcagcggcttgctcaactccacctcggactccgacctcgtgcgctaccgcaccattagcaagattccccaaatcaccctcaactttgtggacctcaagggcgaccccttcttggcttcgcccaccagtgaccgtgagatcatagcacctaagataaaggagcgaacccacaatgtcactgagaaggtcacccaggtcctgtccctgggcgccgacgtgctgcctgagtacaagctgcaggcaccgcgcatccaccgctggaccatcctgcattacagccccttcaaggccgtgtgggactggctcatcctgctgctggtcatctacacggctgtcttcacaccctactcggctgccttcctgctgaaggagacggaagaaggcccgcctgctaccgagtgtggctacgcctgccagccgctggctgtggtggacctcatcgtggacatcatgttcattgtggacatcctcatcaacttccgcaccacctacgtcaatgccaacgaggaggtggtcagccaccccggccgcatcgccgtccactacttcaagggctggttcctcatcgacatggtggccgccatccccttcgacctgctcatcttcggctctggctctgaggagctgatcgggctgctgaagactgcgcggctgctgcggctggtgcgcgtggcgcggaagctggatcgctactcagagtacggcgcggccgtgctgttcttgctcatgtgcacctttgcgctcatcgcgcactggctagcctgcatctggtacgccatcggcaacatggagcagccacacatggactcacgcatcggctggctgcacaacctgggcgaccagataggcaaaccctacaacagcagcggcctgggcggcccctccatcaaggacaagtatgtgacggcgctctacttcaccttcagcagcctcaccagtgtgggcttcggcaacgtctctcccaacaccaactcagagaagatcttctccatctgcgtcatgctcattggctccctcatgtatgctagcatcttcggcaacgtgtcggccatcatccagcggctgtactcgggcacagcccgctaccacacacagatgctgcgggtgcgggagttcatccgcttccaccagatccccaatcccctgcgccagcgcctcgaggagtacttccagcacgcctggtcctacaccaacggcatcgacatgaacgcggtgctgaagggcttccctgagtgcctgcaggctgacatctgcctgcacctgaaccgctcactgctgcagcactgcaaacccttccgaggggccaccaagggctgccttcgggccctggccatgaagttcaagaccacacatgcaccgccaggggacacactggtgcatgctggggacctgctcaccgccctgtacttcatctcccggggctccatcgagatcctgcggggcgacgtcgtcgtggccatcctggggaagaatgacatctttggggagcctctgaacctgtatgcaaggcctggcaagtcgaacggggatgtgcgggccctcacctactgtgacctacacaagatccatcgggacgacctgctggaggtgctggacatgtaccctgagttctccgaccacttctggtccagcctggagatcaccttcaacctgcgagataccaacatgatcccgggctcccccggcagtacggagttagagggtggcttcagtcggcaacgcaagcgcaagttgtccttccgcaggcgcacggacaaggacacggagcagccaggggaggtgtcggccttggggccgggccgggcgggggcagggccgagtagccggggccggccgggggggccgtggggggagagcccgtccagtggcccctccagccctgagagcagtgaggatgagggcccaggccgcagctccagccccctccgcctggtgcccttcttcagccccaggccccccggagagccgccgggtggggagcccctgatggaggactgcgagaagagcagcgacacttgcaaccccctgtcaggcgccttctcaggagtgtccaacattttcagcttctggggggacagtcggggccgccagtaccaggagctccctcgatgccccgcccccacccccagcctcctcaacatccccctctccagcccgggtcggcggccccggggcgacgtggagagcaggctggatgccctccagcgccagctcaacaggctggagacccggctgagtgcagacatggccactgtcctgcagctgctacagaggcagatgacgctggtcccgcccgcctacagtgctgtgaccaccccggggcctggccccacttccacatccccgctgttgcccgtcagccccctccccaccctcaccttggactcgctttctcaggtttcccagttcatggcgtgtgaggagctgcccccgggggccccagagcttccccaagaaggccccacacgacgcctctccctaccgggccagctgggggccctcacctcccagcccctgcacagacacggctcggacccgggcagttagtggggctgcccagtgtggacacgtggctcacccagggatcaaggcgctgctgggccgctccccttggaggccctgctcaggaggccctgaccgtggaaggggagaggaactcgaaagcacagctcctcccccagcccttgggaccatcttctcctgcagtcccctgggccccagtgagaggggcaggggcagggccggcagtaggtggggcctgtggtccccccactgccctgagggcattagctggtctaactgcccggaggcacccggccctgggccttaggcacctcaaggacttttctgctatttactgctcttattgttaaggataataattaaggatcatatgaataattaatgaagatgctgatgactatgaataataaataattatcctgaggaga

SEQ ID NO: 692 - DNA, 3884 bp, Homo sapiens
  source 1..3884: mol_type = genomic DNA
  misc_feature 1..3884: note = cDNA of KCNH2 gene SNP c.2879G>A (p.Ser960Asn)
atgccggtgcggaggggccacgtcgcgccgcagaacaccttcctggacaccatcatccgcaagtttgagggccagagccgtaagttcatcatcgccaacgctcgggtggagaactgcgccgtcatctactgcaacgacggcttctgcgagctgtgcggctactcgcgggccgaggtgatgcagcgaccctgcacctgcgacttcctgcacgggccgcgcacgcagcgccgcgctgccgcgcagatcgcgcaggcactgctgggcgccgaggagcgcaaagtggaaatcgccttctaccggaaagatgggagctgcttcctatgtctggtggatgtggtgcccgtgaagaacgaggatggggctgtcatcatgttcatcctcaatttcgaggtggtgatggagaaggacatggtggggtccccggctcatgacaccaaccaccggggcccccccaccagctggctggccccaggccgcgccaagaccttccgcctgaagctgcccgcgctgctggcgctgacggcccgggagtcgtcggtgcggtcgggcggcgcgggcggcgcgggcgccccgggggccgtggtggtggacgtggacctgacgcccgcggcacccagcagcgagtcgctggccctggacgaagtgacagccatggacaaccacgtggcagggctcgggcccgcggaggagcggcgtgcgctggtgggtcccggctctccgccccgcagcgcgcccggccagctcccatcgccccgggcgcacagcctcaaccccgacgcctcgggctccagctgcagcctggcccggacgcgctcccgagaaagctgcgccagcgtgcgccgcgcctcgtcggccgacgacatcgaggccatgcgcgccggggtgctgcccccgccaccgcgccacgccagcaccggggccatgcacccactgcgcagcggcttgctcaactccacctcggactccgacctcgtgcgctaccgcaccattagcaagattccccaaatcaccctcaactttgtggacctcaagggcgaccccttcttggcttcgcccaccagtgaccgtgagatcatagcacctaagataaaggagcgaacccacaatgtcactgagaaggtcacccaggtcctgtccctgggcgccgacgtgctgcctgagtacaagctgcaggcaccgcgcatccaccgctggaccatcctgcattacagccccttcaaggccgtgtgggactggctcatcctgctgctggtcatctacacggctgtcttcacaccctactcggctgccttcctgctgaaggagacggaagaaggcccgcctgctaccgagtgtggctacgcctgccagccgctggctgtggtggacctcatcgtggacatcatgttcattgtggacatcctcatcaacttccgcaccacctacgtcaatgccaacgaggaggtggtcagccaccccggccgcatcgccgtccactacttcaagggctggttcctcatcgacatggtggccgccatccccttcgacctgctcatcttcggctctggctctgaggagctgatcgggctgctgaagactgcgcggctgctgcggctggtgcgcgtggcgcggaagctggatcgctactcagagtacggcgcggccgtgctgttcttgctcatgtgcacctttgcgctcatcgcgcactggctagcctgcatctggtacgccatcggcaacatggagcagccacacatggactcacgcatcggctggctgcacaacctgggcgaccagataggcaaaccctacaacagcagcggcctgggcggcccctccatcaaggacaagtatgtgacggcgctctacttcaccttcagcagcctcaccagtgtgggcttcggcaacgtctctcccaacaccaactcagagaagatcttctccatctgcgtcatgctcattggctccctcatgtatgctagcatcttcggcaacgtgtcggccatcatccagcggctgtactcgggcacagcccgctaccacacacagatgctgcgggtgcgggagttcatccgcttccaccagatccccaatcccctgcgccagcgcctcgaggagtacttccagcacgcctggtcctacaccaacggcatcgacatgaacgcggtgctgaagggcttccctgagtgcctgcaggctgacatctgcctgcacctgaaccgctcactgctgcagcactgcaaacccttccgaggggccaccaagggctgccttcgggccctggccatgaagttcaagaccacacatgcaccgccaggggacacactggtgcatgctggggacctgctcaccgccctgtacttcatctcccggggctccatcgagatcctgcggggcgacgtcgtcgtggccatcctggggaagaatgacatctttggggagcctctgaacctgtatgcaaggcctggcaagtcgaacggggatgtgcgggccctcacctactgtgacctacacaagatccatcgggacgacctgctggaggtgctggacatgtaccctgagttctccgaccacttctggtccagcctggagatcaccttcaacctgcgagataccaacatgatcccgggctcccccggcagtacggagttagagggtggcttcagtcggcaacgcaagcgcaagttgtccttccgcaggcgcacggacaaggacacggagcagccaggggaggtgtcggccttggggccgggccgggcgggggcagggccgagtagccggggccggccgggggggccgtggggggagagcccgtccagtggcccctccagccctgagagcagtgaggatgagggcccaggccgcagctccagccccctccgcctggtgcccttctccaaccccaggccccccggagagccgccgggtggggagcccctgatggaggactgcgagaagagcagcgacacttgcaaccccctgtcaggcgccttctcaggagtgtccaacattttcagcttctggggggacagtcggggccgccagtaccaggagctccctcgatgccccgcccccacccccagcctcctcaacatccccctctccagcccgggtcggcggccccggggcgacgtggagagcaggctggatgccctccagcgccagctcaacaggctggagacccggctgagtgcagacatggccactgtcctgcagctgctacagaggcagatgacgctggtcccgcccgcctacagtgctgtgaccaccccggggcctggccccacttccacatccccgctgttgcccgtcagccccctccccaccctcaccttggactcgctttctcaggtttcccagttcatggcgtgtgaggagctgcccccgggggccccagagcttccccaagaaggccccacacgacgcctctccctaccgggccagctgggggccctcacctcccagcccctgcacagacacggctcggacccgggcagttagtggggctgcccagtgtggacacgtggctcacccagggatcaaggcgctgctgggccgctccccttggaggccctgctcaggaggccctgaccgtggaaggggagaggaactcgaaagcacagctcctcccccagcccttgggaccatcttctcctgcagtcccctgggccccagtgagaggggcaggggcagggccggcagtaggtggggcctgtggtccccccactgccctgagggcattagctggtctaactgcccggaggcacccggccctgggccttaggcacctcaaggacttttctgctatttactgctcttattgttaaggataataattaaggatcatatgaataattaatgaagatgctgatgactatgaataataaataattatcctgaggaga

SEQ ID NO: 693 - DNA, 3884 bp, Homo sapiens
  source 1..3884: mol_type = genomic DNA
  misc_feature 1..3884: note = cDNA of KCNH2 gene SNP c.287T>C (p.Ile96Thr)
atgccggtgcggaggggccacgtcgcgccgcagaacaccttcctggacaccatcatccgcaagtttgagggccagagccgtaagttcatcatcgccaacgctcgggtggagaactgcgccgtcatctactgcaacgacggcttctgcgagctgtgcggctactcgcgggccgaggtgatgcagcgaccctgcacctgcgacttcctgcacgggccgcgcacgcagcgccgcgctgccgcgcagatcgcgcaggcactgctgggcgccgaggagcgcaaagtggaaaccgccttctaccggaaagatgggagctgcttcctatgtctggtggatgtggtgcccgtgaagaacgaggatggggctgtcatcatgttcatcctcaatttcgaggtggtgatggagaaggacatggtggggtccccggctcatgacaccaaccaccggggcccccccaccagctggctggccccaggccgcgccaagaccttccgcctgaagctgcccgcgctgctggcgctgacggcccgggagtcgtcggtgcggtcgggcggcgcgggcggcgcgggcgccccgggggccgtggtggtggacgtggacctgacgcccgcggcacccagcagcgagtcgctggccctggacgaagtgacagccatggacaaccacgtggcagggctcgggcccgcggaggagcggcgtgcgctggtgggtcccggctctccgccccgcagcgcgcccggccagctcccatcgccccgggcgcacagcctcaaccccgacgcctcgggctccagctgcagcctggcccggacgcgctcccgagaaagctgcgccagcgtgcgccgcgcctcgtcggccgacgacatcgaggccatgcgcgccggggtgctgcccccgccaccgcgccacgccagcaccggggccatgcacccactgcgcagcggcttgctcaactccacctcggactccgacctcgtgcgctaccgcaccattagcaagattccccaaatcaccctcaactttgtggacctcaagggcgaccccttcttggcttcgcccaccagtgaccgtgagatcatagcacctaagataaaggagcgaacccacaatgtcactgagaaggtcacccaggtcctgtccctgggcgccgacgtgctgcctgagtacaagctgcaggcaccgcgcatccaccgctggaccatcctgcattacagccccttcaaggccgtgtgggactggctcatcctgctgctggtcatctacacggctgtcttcacaccctactcggctgccttcctgctgaaggagacggaagaaggcccgcctgctaccgagtgtggctacgcctgccagccgctggctgtggtggacctcatcgtggacatcatgttcattgtggacatcctcatcaacttccgcaccacctacgtcaatgccaacgaggaggtggtcagccaccccggccgcatcgccgtccactacttcaagggctggttcctcatcgacatggtggccgccatccccttcgacctgctcatcttcggctctggctctgaggagctgatcgggctgctgaagactgcgcggctgctgcggctggtgcgcgtggcgcggaagctggatcgctactcagagtacggcgcggccgtgctgttcttgctcatgtgcacctttgcgctcatcgcgcactggctagcctgcatctggtacgccatcggcaacatggagcagccacacatggactcacgcatcggctggctgcacaacctgggcgaccagataggcaaaccctacaacagcagcggcctgggcggcccctccatcaaggacaagtatgtgacggcgctctacttcaccttcagcagcctcaccagtgtgggcttcggcaacgtctctcccaacaccaactcagagaagatcttctccatctgcgtcatgctcattggctccctcatgtatgctagcatcttcggcaacgtgtcggccatcatccagcggctgtactcgggcacagcccgctaccacacacagatgctgcgggtgcgggagttcatccgcttccaccagatccccaatcccctgcgccagcgcctcgaggagtacttccagcacgcctggtcctacaccaacggcatcgacatgaacgcggtgctgaagggcttccctgagtgcctgcaggctgacatctgcctgcacctgaaccgctcactgctgcagcactgcaaacccttccgaggggccaccaagggctgccttcgggccctggccatgaagttcaagaccacacatgcaccgccaggggacacactggtgcatgctggggacctgctcaccgccctgtacttcatctcccggggctccatcgagatcctgcggggcgacgtcgtcgtggccatcctggggaagaatgacatctttggggagcctctgaacctgtatgcaaggcctggcaagtcgaacggggatgtgcgggccctcacctactgtgacctacacaagatccatcgggacgacctgctggaggtgctggacatgtaccctgagttctccgaccacttctggtccagcctggagatcaccttcaacctgcgagataccaacatgatcccgggctcccccggcagtacggagttagagggtggcttcagtcggcaacgcaagcgcaagttgtccttccgcaggcgcacggacaaggacacggagcagccaggggaggtgtcggccttggggccgggccgggcgggggcagggccgagtagccggggccggccgggggggccgtggggggagagcccgtccagtggcccctccagccctgagagcagtgaggatgagggcccaggccgcagctccagccccctccgcctggtgcccttctccagccccaggccccccggagagccgccgggtggggagcccctgatggaggactgcgagaagagcagcgacacttgcaaccccctgtcaggcgccttctcaggagtgtccaacattttcagcttctggggggacagtcggggccgccagtaccaggagctccctcgatgccccgcccccacccccagcctcctcaacatccccctctccagcccgggtcggcggccccggggcgacgtggagagcaggctggatgccctccagcgccagctcaacaggctggagacccggctgagtgcagacatggccactgtcctgcagctgctacagaggcagatgacgctggtcccgcccgcctacagtgctgtgaccaccccggggcctggccccacttccacatccccgctgttgcccgtcagccccctccccaccctcaccttggactcgctttctcaggtttcccagttcatggcgtgtgaggagctgcccccgggggccccagagcttccccaagaaggccccacacgacgcctctccctaccgggccagctgggggccctcacctcccagcccctgcacagacacggctcggacccgggcagttagtggggctgcccagtgtggacacgtggctcacccagggatcaaggcgctgctgggccgctccccttggaggccctgctcaggaggccctgaccgtggaaggggagaggaactcgaaagcacagctcctcccccagcccttgggaccatcttctcctgcagtcccctgggccccagtgagaggggcaggggcagggccggcagtaggtggggcctgtggtccccccactgccctgagggcattagctggtctaactgcccggaggcacccggccctgggccttaggcacctcaaggacttttctgctatttactgctcttattgttaaggataataattaaggatcatatgaataattaatgaagatgctgatgactatgaataataaataattatcctgaggaga

SEQ ID NO: 694 - DNA, 3884 bp, Homo sapiens
  source 1..3884: mol_type = genomic DNA
  misc_feature 1..3884: note = cDNA of KCNH2 gene SNP c.2887C>A (p.Pro963Thr)
atgccggtgcggaggggccacgtcgcgccgcagaacaccttcctggacaccatcatccgcaagtttgagggccagagccgtaagttcatcatcgccaacgctcgggtggagaactgcgccgtcatctactgcaacgacggcttctgcgagctgtgcggctactcgcgggccgaggtgatgcagcgaccctgcacctgcgacttcctgcacgggccgcgcacgcagcgccgcgctgccgcgcagatcgcgcaggcactgctgggcgccgaggagcgcaaagtggaaatcgccttctaccggaaagatgggagctgcttcctatgtctggtggatgtggtgcccgtgaagaacgaggatggggctgtcatcatgttcatcctcaatttcgaggtggtgatggagaaggacatggtggggtccccggctcatgacaccaaccaccggggcccccccaccagctggctggccccaggccgcgccaagaccttccgcctgaagctgcccgcgctgctggcgctgacggcccgggagtcgtcggtgcggtcgggcggcgcgggcggcgcgggcgccccgggggccgtggtggtggacgtggacctgacgcccgcggcacccagcagcgagtcgctggccctggacgaagtgacagccatggacaaccacgtggcagggctcgggcccgcggaggagcggcgtgcgctggtgggtcccggctctccgccccgcagcgcgcccggccagctcccatcgccccgggcgcacagcctcaaccccgacgcctcgggctccagctgcagcctggcccggacgcgctcccgagaaagctgcgccagcgtgcgccgcgcctcgtcggccgacgacatcgaggccatgcgcgccggggtgctgcccccgccaccgcgccacgccagcaccggggccatgcacccactgcgcagcggcttgctcaactccacctcggactccgacctcgtgcgctaccgcaccattagcaagattccccaaatcaccctcaactttgtggacctcaagggcgaccccttcttggcttcgcccaccagtgaccgtgagatcatagcacctaagataaaggagcgaacccacaatgtcactgagaaggtcacccaggtcctgtccctgggcgccgacgtgctgcctgagtacaagctgcaggcaccgcgcatccaccgctggaccatcctgcattacagccccttcaaggccgtgtgggactggctcatcctgctgctggtcatctacacggctgtcttcacaccctactcggctgccttcctgctgaaggagacggaagaaggcccgcctgctaccgagtgtggctacgcctgccagccgctggctgtggtggacctcatcgtggacatcatgttcattgtggacatcctcatcaacttccgcaccacctacgtcaatgccaacgaggaggtggtcagccaccccggccgcatcgccgtccactacttcaagggctggttcctcatcgacatggtggccgccatccccttcgacctgctcatcttcggctctggctctgaggagctgatcgggctgctgaagactgcgcggctgctgcggctggtgcgcgtggcgcggaagctggatcgctactcagagtacggcgcggccgtgctgttcttgctcatgtgcacctttgcgctcatcgcgcactggctagcctgcatctggtacgccatcggcaacatggagcagccacacatggactcacgcatcggctggctgcacaacctgggcgaccagataggcaaaccctacaacagcagcggcctgggcggcccctccatcaaggacaagtatgtgacggcgctctacttcaccttcagcagcctcaccagtgtgggcttcggcaacgtctctcccaacaccaactcagagaagatcttctccatctgcgtcatgctcattggctccctcatgtatgctagcatcttcggcaacgtgtcggccatcatccagcggctgtactcgggcacagcccgctaccacacacagatgctgcgggtgcgggagttcatccgcttccaccagatccccaatcccctgcgccagcgcctcgaggagtacttccagcacgcctggtcctacaccaacggcatcgacatgaacgcggtgctgaagggcttccctgagtgcctgcaggctgacatctgcctgcacctgaaccgctcactgctgcagcactgcaaacccttccgaggggccaccaagggctgccttcgggccctggccatgaagttcaagaccacacatgcaccgccaggggacacactggtgcatgctggggacctgctcaccgccctgtacttcatctcccggggctccatcgagatcctgcggggcgacgtcgtcgtggccatcctggggaagaatgacatctttggggagcctctgaacctgtatgcaaggcctggcaagtcgaacggggatgtgcgggccctcacctactgtgacctacacaagatccatcgggacgacctgctggaggtgctggacatgtaccctgagttctccgaccacttctggtccagcctggagatcaccttcaacctgcgagataccaacatgatcccgggctcccccggcagtacggagttagagggtggcttcagtcggcaacgcaagcgcaagttgtccttccgcaggcgcacggacaaggacacggagcagccaggggaggtgtcggccttggggccgggccgggcgggggcagggccgagtagccggggccggccgggggggccgtggggggagagcccgtccagtggcccctccagccctgagagcagtgaggatgagggcccaggccgcagctccagccccctccgcctggtgcccttctccagccccaggacccccggagagccgccgggtggggagcccctgatggaggactgcgagaagagcagcgacacttgcaaccccctgtcaggcgccttctcaggagtgtccaacattttcagcttctggggggacagtcggggccgccagtaccaggagctccctcgatgccccgcccccacccccagcctcctcaacatccccctctccagcccgggtcggcggccccggggcgacgtggagagcaggctggatgccctccagcgccagctcaacaggctggagacccggctgagtgcagacatggccactgtcctgcagctgctacagaggcagatgacgctggtcccgcccgcctacagtgctgtgaccaccccggggcctggccccacttccacatccccgctgttgcccgtcagccccctccccaccctcaccttggactcgctttctcaggtttcccagttcatggcgtgtgaggagctgcccccgggggccccagagcttccccaagaaggccccacacgacgcctctccctaccgggccagctgggggccctcacctcccagcccctgcacagacacggctcggacccgggcagttagtggggctgcccagtgtggacacgtggctcacccagggatcaaggcgctgctgggccgctccccttggaggccctgctcaggaggccctgaccgtggaaggggagaggaactcgaaagcacagctcctcccccagcccttgggaccatcttctcctgcagtcccctgggccccagtgagaggggcaggggcagggccggcagtaggtggggcctgtggtccccccactgccctgagggcattagctggtctaactgcccggaggcacccggccctgggccttaggcacctcaaggacttttctgctatttactgctcttattgttaaggataataattaaggatcatatgaataattaatgaagatgctgatgactatgaataataaataattatcctgaggaga

SEQ ID NO: 695 - DNA, 3884 bp, Homo sapiens
  source 1..3884: mol_type = genomic DNA
  misc_feature 1..3884: note = cDNA of KCNH2 gene SNP c.2890C>G (p.Pro964Ala)
atgccggtgcggaggggccacgtcgcgccgcagaacaccttcctggacaccatcatccgcaagtttgagggccagagccgtaagttcatcatcgccaacgctcgggtggagaactgcgccgtcatctactgcaacgacggcttctgcgagctgtgcggctactcgcgggccgaggtgatgcagcgaccctgcacctgcgacttcctgcacgggccgcgcacgcagcgccgcgctgccgcgcagatcgcgcaggcactgctgggcgccgaggagcgcaaagtggaaatcgccttctaccggaaagatgggagctgcttcctatgtctggtggatgtggtgcccgtgaagaacgaggatggggctgtcatcatgttcatcctcaatttcgaggtggtgatggagaaggacatggtggggtccccggctcatgacaccaaccaccggggcccccccaccagctggctggccccaggccgcgccaagaccttccgcctgaagctgcccgcgctgctggcgctgacggcccgggagtcgtcggtgcggtcgggcggcgcgggcggcgcgggcgccccgggggccgtggtggtggacgtggacctgacgcccgcggcacccagcagcgagtcgctggccctggacgaagtgacagccatggacaaccacgtggcagggctcgggcccgcggaggagcggcgtgcgctggtgggtcccggctctccgccccgcagcgcgcccggccagctcccatcgccccgggcgcacagcctcaaccccgacgcctcgggctccagctgcagcctggcccggacgcgctcccgagaaagctgcgccagcgtgcgccgcgcctcgtcggccgacgacatcgaggccatgcgcgccggggtgctgcccccgccaccgcgccacgccagcaccggggccatgcacccactgcgcagcggcttgctcaactccacctcggactccgacctcgtgcgctaccgcaccattagcaagattccccaaatcaccctcaactttgtggacctcaagggcgaccccttcttggcttcgcccaccagtgaccgtgagatcatagcacctaagataaaggagcgaacccacaatgtcactgagaaggtcacccaggtcctgtccctgggcgccgacgtgctgcctgagtacaagctgcaggcaccgcgcatccaccgctggaccatcctgcattacagccccttcaaggccgtgtgggactggctcatcctgctgctggtcatctacacggctgtcttcacaccctactcggctgccttcctgctgaaggagacggaagaaggcccgcctgctaccgagtgtggctacgcctgccagccgctggctgtggtggacctcatcgtggacatcatgttcattgtggacatcctcatcaacttccgcaccacctacgtcaatgccaacgaggaggtggtcagccaccccggccgcatcgccgtccactacttcaagggctggttcctcatcgacatggtggccgccatccccttcgacctgctcatcttcggctctggctctgaggagctgatcgggctgctgaagactgcgcggctgctgcggctggtgcgcgtggcgcggaagctggatcgctactcagagtacggcgcggccgtgctgttcttgctcatgtgcacctttgcgctcatcgcgcactggctagcctgcatctggtacgccatcggcaacatggagcagccacacatggactcacgcatcggctggctgcacaacctgggcgaccagataggcaaaccctacaacagcagcggcctgggcggcccctccatcaaggacaagtatgtgacggcgctctacttcaccttcagcagcctcaccagtgtgggcttcggcaacgtctctcccaacaccaactcagagaagatcttctccatctgcgtcatgctcattggctccctcatgtatgctagcatcttcggcaacgtgtcggccatcatccagcggctgtactcgggcacagcccgctaccacacacagatgctgcgggtgcgggagttcatccgcttccaccagatccccaatcccctgcgccagcgcctcgaggagtacttccagcacgcctggtcctacaccaacggcatcgacatgaacgcggtgctgaagggcttccctgagtgcctgcaggctgacatctgcctgcacctgaaccgctcactgctgcagcactgcaaacccttccgaggggccaccaagggctgccttcgggccctggccatgaagttcaagaccacacatgcaccgccaggggacacactggtgcatgctggggacctgctcaccgccctgtacttcatctcccggggctccatcgagatcctgcggggcgacgtcgtcgtggccatcctggggaagaatgacatctttggggagcctctgaacctgtatgcaaggcctggcaagtcgaacggggatgtgcgggccctcacctactgtgacctacacaagatccatcgggacgacctgctggaggtgctggacatgtaccctgagttctccgaccacttctggtccagcctggagatcaccttcaacctgcgagataccaacatgatcccgggctcccccggcagtacggagttagagggtggcttcagtcggcaacgcaagcgcaagttgtccttccgcaggcgcacggacaaggacacggagcagccaggggaggtgtcggccttggggccgggccgggcgggggcagggccgagtagccggggccggccgggggggccgtggggggagagcccgtccagtggcccctccagccctgagagcagtgaggatgagggcccaggccgcagctccagccccctccgcctggtgcccttctccagccccaggcccgccggagagccgccgggtggggagcccctgatggaggactgcgagaagagcagcgacacttgcaaccccctgtcaggcgccttctcaggagtgtccaacattttcagcttctggggggacagtcggggccgccagtaccaggagctccctcgatgccccgcccccacccccagcctcctcaacatccccctctccagcccgggtcggcggccccggggcgacgtggagagcaggctggatgccctccagcgccagctcaacaggctggagacccggctgagtgcagacatggccactgtcctgcagctgctacagaggcagatgacgctggtcccgcccgcctacagtgctgtgaccaccccggggcctggccccacttccacatccccgctgttgcccgtcagccccctccccaccctcaccttggactcgctttctcaggtttcccagttcatggcgtgtgaggagctgcccccgggggccccagagcttccccaagaaggccccacacgacgcctctccctaccgggccagctgggggccctcacctcccagcccctgcacagacacggctcggacccgggcagttagtggggctgcccagtgtggacacgtggctcacccagggatcaaggcgctgctgggccgctccccttggaggccctgctcaggaggccctgaccgtggaaggggagaggaactcgaaagcacagctcctcccccagcccttgggaccatcttctcctgcagtcccctgggccccagtgagaggggcaggggcagggccggcagtaggtggggcctgtggtccccccactgccctgagggcattagctggtctaactgcccggaggcacccggccctgggccttaggcacctcaaggacttttctgctatttactgctcttattgttaaggataataattaaggatcatatgaataattaatgaagatgctgatgactatgaataataaataattatcctgaggaga

SEQ ID NO: 696 - DNA, 3884 bp, Homo sapiens
  source 1..3884: mol_type = genomic DNA
  misc_feature 1..3884: note = cDNA of KCNH2 gene SNP c.2891C>G (p.Pro964Arg)
atgccggtgcggaggggccacgtcgcgccgcagaacaccttcctggacaccatcatccgcaagtttgagggccagagccgtaagttcatcatcgccaacgctcgggtggagaactgcgccgtcatctactgcaacgacggcttctgcgagctgtgcggctactcgcgggccgaggtgatgcagcgaccctgcacctgcgacttcctgcacgggccgcgcacgcagcgccgcgctgccgcgcagatcgcgcaggcactgctgggcgccgaggagcgcaaagtggaaatcgccttctaccggaaagatgggagctgcttcctatgtctggtggatgtggtgcccgtgaagaacgaggatggggctgtcatcatgttcatcctcaatttcgaggtggtgatggagaaggacatggtggggtccccggctcatgacaccaaccaccggggcccccccaccagctggctggccccaggccgcgccaagaccttccgcctgaagctgcccgcgctgctggcgctgacggcccgggagtcgtcggtgcggtcgggcggcgcgggcggcgcgggcgccccgggggccgtggtggtggacgtggacctgacgcccgcggcacccagcagcgagtcgctggccctggacgaagtgacagccatggacaaccacgtggcagggctcgggcccgcggaggagcggcgtgcgctggtgggtcccggctctccgccccgcagcgcgcccggccagctcccatcgccccgggcgcacagcctcaaccccgacgcctcgggctccagctgcagcctggcccggacgcgctcccgagaaagctgcgccagcgtgcgccgcgcctcgtcggccgacgacatcgaggccatgcgcgccggggtgctgcccccgccaccgcgccacgccagcaccggggccatgcacccactgcgcagcggcttgctcaactccacctcggactccgacctcgtgcgctaccgcaccattagcaagattccccaaatcaccctcaactttgtggacctcaagggcgaccccttcttggcttcgcccaccagtgaccgtgagatcatagcacctaagataaaggagcgaacccacaatgtcactgagaaggtcacccaggtcctgtccctgggcgccgacgtgctgcctgagtacaagctgcaggcaccgcgcatccaccgctggaccatcctgcattacagccccttcaaggccgtgtgggactggctcatcctgctgctggtcatctacacggctgtcttcacaccctactcggctgccttcctgctgaaggagacggaagaaggcccgcctgctaccgagtgtggctacgcctgccagccgctggctgtggtggacctcatcgtggacatcatgttcattgtggacatcctcatcaacttccgcaccacctacgtcaatgccaacgaggaggtggtcagccaccccggccgcatcgccgtccactacttcaagggctggttcctcatcgacatggtggccgccatccccttcgacctgctcatcttcggctctggctctgaggagctgatcgggctgctgaagactgcgcggctgctgcggctggtgcgcgtggcgcggaagctggatcgctactcagagtacggcgcggccgtgctgttcttgctcatgtgcacctttgcgctcatcgcgcactggctagcctgcatctggtacgccatcggcaacatggagcagccacacatggactcacgcatcggctggctgcacaacctgggcgaccagataggcaaaccctacaacagcagcggcctgggcggcccctccatcaaggacaagtatgtgacggcgctctacttcaccttcagcagcctcaccagtgtgggcttcggcaacgtctctcccaacaccaactcagagaagatcttctccatctgcgtcatgctcattggctccctcatgtatgctagcatcttcggcaacgtgtcggccatcatccagcggctgtactcgggcacagcccgctaccacacacagatgctgcgggtgcgggagttcatccgcttccaccagatccccaatcccctgcgccagcgcctcgaggagtacttccagcacgcctggtcctacaccaacggcatcgacatgaacgcggtgctgaagggcttccctgagtgcctgcaggctgacatctgcctgcacctgaaccgctcactgctgcagcactgcaaacccttccgaggggccaccaagggctgccttcgggccctggccatgaagttcaagaccacacatgcaccgccaggggacacactggtgcatgctggggacctgctcaccgccctgtacttcatctcccggggctccatcgagatcctgcggggcgacgtcgtcgtggccatcctggggaagaatgacatctttggggagcctctgaacctgtatgcaaggcctggcaagtcgaacggggatgtgcgggccctcacctactgtgacctacacaagatccatcgggacgacctgctggaggtgctggacatgtaccctgagttctccgaccacttctggtccagcctggagatcaccttcaacctgcgagataccaacatgatcccgggctcccccggcagtacggagttagagggtggcttcagtcggcaacgcaagcgcaagttgtccttccgcaggcgcacggacaaggacacggagcagccaggggaggtgtcggccttggggccgggccgggcgggggcagggccgagtagccggggccggccgggggggccgtggggggagagcccgtccagtggcccctccagccctgagagcagtgaggatgagggcccaggccgcagctccagccccctccgcctggtgcccttctccagccccaggccccgcggagagccgccgggtggggagcccctgatggaggactgcgagaagagcagcgacacttgcaaccccctgtcaggcgccttctcaggagtgtccaacattttcagcttctggggggacagtcggggccgccagtaccaggagctccctcgatgccccgcccccacccccagcctcctcaacatccccctctccagcccgggtcggcggccccggggcgacgtggagagcaggctggatgccctccagcgccagctcaacaggctggagacccggctgagtgcagacatggccactgtcctgcagctgctacagaggcagatgacgctggtcccgcccgcctacagtgctgtgaccaccccggggcctggccccacttccacatccccgctgttgcccgtcagccccctccccaccctcaccttggactcgctttctcaggtttcccagttcatggcgtgtgaggagctgcccccgggggccccagagcttccccaagaaggccccacacgacgcctctccctaccgggccagctgggggccctcacctcccagcccctgcacagacacggctcggacccgggcagttagtggggctgcccagtgtggacacgtggctcacccagggatcaaggcgctgctgggccgctccccttggaggccctgctcaggaggccctgaccgtggaaggggagaggaactcgaaagcacagctcctcccccagcccttgggaccatcttctcctgcagtcccctgggccccagtgagaggggcaggggcagggccggcagtaggtggggcctgtggtccccccactgccctgagggcattagctggtctaactgcccggaggcacccggccctgggccttaggcacctcaaggacttttctgctatttactgctcttattgttaaggataataattaaggatcatatgaataattaatgaagatgctgatgactatgaataataaataattatcctgaggaga

SEQ ID NO: 697 - DNA, 3884 bp, Homo sapiens
  source 1..3884: mol_type = genomic DNA
  misc_feature 1..3884: note = cDNA of KCNH2 gene SNP c.2891C>T (p.Pro964Leu)
atgccggtgcggaggggccacgtcgcgccgcagaacaccttcctggacaccatcatccgcaagtttgagggccagagccgtaagttcatcatcgccaacgctcgggtggagaactgcgccgtcatctactgcaacgacggcttctgcgagctgtgcggctactcgcgggccgaggtgatgcagcgaccctgcacctgcgacttcctgcacgggccgcgcacgcagcgccgcgctgccgcgcagatcgcgcaggcactgctgggcgccgaggagcgcaaagtggaaatcgccttctaccggaaagatgggagctgcttcctatgtctggtggatgtggtgcccgtgaagaacgaggatggggctgtcatcatgttcatcctcaatttcgaggtggtgatggagaaggacatggtggggtccccggctcatgacaccaaccaccggggcccccccaccagctggctggccccaggccgcgccaagaccttccgcctgaagctgcccgcgctgctggcgctgacggcccgggagtcgtcggtgcggtcgggcggcgcgggcggcgcgggcgccccgggggccgtggtggtggacgtggacctgacgcccgcggcacccagcagcgagtcgctggccctggacgaagtgacagccatggacaaccacgtggcagggctcgggcccgcggaggagcggcgtgcgctggtgggtcccggctctccgccccgcagcgcgcccggccagctcccatcgccccgggcgcacagcctcaaccccgacgcctcgggctccagctgcagcctggcccggacgcgctcccgagaaagctgcgccagcgtgcgccgcgcctcgtcggccgacgacatcgaggccatgcgcgccggggtgctgcccccgccaccgcgccacgccagcaccggggccatgcacccactgcgcagcggcttgctcaactccacctcggactccgacctcgtgcgctaccgcaccattagcaagattccccaaatcaccctcaactttgtggacctcaagggcgaccccttcttggcttcgcccaccagtgaccgtgagatcatagcacctaagataaaggagcgaacccacaatgtcactgagaaggtcacccaggtcctgtccctgggcgccgacgtgctgcctgagtacaagctgcaggcaccgcgcatccaccgctggaccatcctgcattacagccccttcaaggccgtgtgggactggctcatcctgctgctggtcatctacacggctgtcttcacaccctactcggctgccttcctgctgaaggagacggaagaaggcccgcctgctaccgagtgtggctacgcctgccagccgctggctgtggtggacctcatcgtggacatcatgttcattgtggacatcctcatcaacttccgcaccacctacgtcaatgccaacgaggaggtggtcagccaccccggccgcatcgccgtccactacttcaagggctggttcctcatcgacatggtggccgccatccccttcgacctgctcatcttcggctctggctctgaggagctgatcgggctgctgaagactgcgcggctgctgcggctggtgcgcgtggcgcggaagctggatcgctactcagagtacggcgcggccgtgctgttcttgctcatgtgcacctttgcgctcatcgcgcactggctagcctgcatctggtacgccatcggcaacatggagcagccacacatggactcacgcatcggctggctgcacaacctgggcgaccagataggcaaaccctacaacagcagcggcctgggcggcccctccatcaaggacaagtatgtgacggcgctctacttcaccttcagcagcctcaccagtgtgggcttcggcaacgtctctcccaacaccaactcagagaagatcttctccatctgcgtcatgctcattggctccctcatgtatgctagcatcttcggcaacgtgtcggccatcatccagcggctgtactcgggcacagcccgctaccacacacagatgctgcgggtgcgggagttcatccgcttccaccagatccccaatcccctgcgccagcgcctcgaggagtacttccagcacgcctggtcctacaccaacggcatcgacatgaacgcggtgctgaagggcttccctgagtgcctgcaggctgacatctgcctgcacctgaaccgctcactgctgcagcactgcaaacccttccgaggggccaccaagggctgccttcgggccctggccatgaagttcaagaccacacatgcaccgccaggggacacactggtgcatgctggggacctgctcaccgccctgtacttcatctcccggggctccatcgagatcctgcggggcgacgtcgtcgtggccatcctggggaagaatgacatctttggggagcctctgaacctgtatgcaaggcctggcaagtcgaacggggatgtgcgggccctcacctactgtgacctacacaagatccatcgggacgacctgctggaggtgctggacatgtaccctgagttctccgaccacttctggtccagcctggagatcaccttcaacctgcgagataccaacatgatcccgggctcccccggcagtacggagttagagggtggcttcagtcggcaacgcaagcgcaagttgtccttccgcaggcgcacggacaaggacacggagcagccaggggaggtgtcggccttggggccgggccgggcgggggcagggccgagtagccggggccggccgggggggccgtggggggagagcccgtccagtggcccctccagccctgagagcagtgaggatgagggcccaggccgcagctccagccccctccgcctggtgcccttctccagccccaggcccctcggagagccgccgggtggggagcccctgatggaggactgcgagaagagcagcgacacttgcaaccccctgtcaggcgccttctcaggagtgtccaacattttcagcttctggggggacagtcggggccgccagtaccaggagctccctcgatgccccgcccccacccccagcctcctcaacatccccctctccagcccgggtcggcggccccggggcgacgtggagagcaggctggatgccctccagcgccagctcaacaggctggagacccggctgagtgcagacatggccactgtcctgcagctgctacagaggcagatgacgctggtcccgcccgcctacagtgctgtgaccaccccggggcctggccccacttccacatccccgctgttgcccgtcagccccctccccaccctcaccttggactcgctttctcaggtttcccagttcatggcgtgtgaggagctgcccccgggggccccagagcttccccaagaaggccccacacgacgcctctccctaccgggccagctgggggccctcacctcccagcccctgcacagacacggctcggacccgggcagttagtggggctgcccagtgtggacacgtggctcacccagggatcaaggcgctgctgggccgctccccttggaggccctgctcaggaggccctgaccgtggaaggggagaggaactcgaaagcacagctcctcccccagcccttgggaccatcttctcctgcagtcccctgggccccagtgagaggggcaggggcagggccggcagtaggtggggcctgtggtccccccactgccctgagggcattagctggtctaactgcccggaggcacccggccctgggccttaggcacctcaaggacttttctgctatttactgctcttattgttaaggataataattaaggatcatatgaataattaatgaagatgctgatgactatgaataataaataattatcctgaggaga

SEQ ID NO: 698 - DNA, 3884 bp, Homo sapiens
  source 1..3884: mol_type = genomic DNA
  misc_feature 1..3884: note = cDNA of KCNH2 gene SNP c.2893G>A (p.Gly965Arg)
atgccggtgcggaggggccacgtcgcgccgcagaacaccttcctggacaccatcatccgcaagtttgagggccagagccgtaagttcatcatcgccaacgctcgggtggagaactgcgccgtcatctactgcaacgacggcttctgcgagctgtgcggctactcgcgggccgaggtgatgcagcgaccctgcacctgcgacttcctgcacgggccgcgcacgcagcgccgcgctgccgcgcagatcgcgcaggcactgctgggcgccgaggagcgcaaagtggaaatcgccttctaccggaaagatgggagctgcttcctatgtctggtggatgtggtgcccgtgaagaacgaggatggggctgtcatcatgttcatcctcaatttcgaggtggtgatggagaaggacatggtggggtccccggctcatgacaccaaccaccggggcccccccaccagctggctggccccaggccgcgccaagaccttccgcctgaagctgcccgcgctgctggcgctgacggcccgggagtcgtcggtgcggtcgggcggcgcgggcggcgcgggcgccccgggggccgtggtggtggacgtggacctgacgcccgcggcacccagcagcgagtcgctggccctggacgaagtgacagccatggacaaccacgtggcagggctcgggcccgcggaggagcggcgtgcgctggtgggtcccggctctccgccccgcagcgcgcccggccagctcccatcgccccgggcgcacagcctcaaccccgacgcctcgggctccagctgcagcctggcccggacgcgctcccgagaaagctgcgccagcgtgcgccgcgcctcgtcggccgacgacatcgaggccatgcgcgccggggtgctgcccccgccaccgcgccacgccagcaccggggccatgcacccactgcgcagcggcttgctcaactccacctcggactccgacctcgtgcgctaccgcaccattagcaagattccccaaatcaccctcaactttgtggacctcaagggcgaccccttcttggcttcgcccaccagtgaccgtgagatcatagcacctaagataaaggagcgaacccacaatgtcactgagaaggtcacccaggtcctgtccctgggcgccgacgtgctgcctgagtacaagctgcaggcaccgcgcatccaccgctggaccatcctgcattacagccccttcaaggccgtgtgggactggctcatcctgctgctggtcatctacacggctgtcttcacaccctactcggctgccttcctgctgaaggagacggaagaaggcccgcctgctaccgagtgtggctacgcctgccagccgctggctgtggtggacctcatcgtggacatcatgttcattgtggacatcctcatcaacttccgcaccacctacgtcaatgccaacgaggaggtggtcagccaccccggccgcatcgccgtccactacttcaagggctggttcctcatcgacatggtggccgccatccccttcgacctgctcatcttcggctctggctctgaggagctgatcgggctgctgaagactgcgcggctgctgcggctggtgcgcgtggcgcggaagctggatcgctactcagagtacggcgcggccgtgctgttcttgctcatgtgcacctttgcgctcatcgcgcactggctagcctgcatctggtacgccatcggcaacatggagcagccacacatggactcacgcatcggctggctgcacaacctgggcgaccagataggcaaaccctacaacagcagcggcctgggcggcccctccatcaaggacaagtatgtgacggcgctctacttcaccttcagcagcctcaccagtgtgggcttcggcaacgtctctcccaacaccaactcagagaagatcttctccatctgcgtcatgctcattggctccctcatgtatgctagcatcttcggcaacgtgtcggccatcatccagcggctgtactcgggcacagcccgctaccacacacagatgctgcgggtgcgggagttcatccgcttccaccagatccccaatcccctgcgccagcgcctcgaggagtacttccagcacgcctggtcctacaccaacggcatcgacatgaacgcggtgctgaagggcttccctgagtgcctgcaggctgacatctgcctgcacctgaaccgctcactgctgcagcactgcaaacccttccgaggggccaccaagggctgccttcgggccctggccatgaagttcaagaccacacatgcaccgccaggggacacactggtgcatgctggggacctgctcaccgccctgtacttcatctcccggggctccatcgagatcctgcggggcgacgtcgtcgtggccatcctggggaagaatgacatctttggggagcctctgaacctgtatgcaaggcctggcaagtcgaacggggatgtgcgggccctcacctactgtgacctacacaagatccatcgggacgacctgctggaggtgctggacatgtaccctgagttctccgaccacttctggtccagcctggagatcaccttcaacctgcgagataccaacatgatcccgggctcccccggcagtacggagttagagggtggcttcagtcggcaacgcaagcgcaagttgtccttccgcaggcgcacggacaaggacacggagcagccaggggaggtgtcggccttggggccgggccgggcgggggcagggccgagtagccggggccggccgggggggccgtggggggagagcccgtccagtggcccctccagccctgagagcagtgaggatgagggcccaggccgcagctccagccccctccgcctggtgcccttctccagccccaggccccccagagagccgccgggtggggagcccctgatggaggactgcgagaagagcagcgacacttgcaaccccctgtcaggcgccttctcaggagtgtccaacattttcagcttctggggggacagtcggggccgccagtaccaggagctccctcgatgccccgcccccacccccagcctcctcaacatccccctctccagcccgggtcggcggccccggggcgacgtggagagcaggctggatgccctccagcgccagctcaacaggctggagacccggctgagtgcagacatggccactgtcctgcagctgctacagaggcagatgacgctggtcccgcccgcctacagtgctgtgaccaccccggggcctggccccacttccacatccccgctgttgcccgtcagccccctccccaccctcaccttggactcgctttctcaggtttcccagttcatggcgtgtgaggagctgcccccgggggccccagagcttccccaagaaggccccacacgacgcctctccctaccgggccagctgggggccctcacctcccagcccctgcacagacacggctcggacccgggcagttagtggggctgcccagtgtggacacgtggctcacccagggatcaaggcgctgctgggccgctccccttggaggccctgctcaggaggccctgaccgtggaaggggagaggaactcgaaagcacagctcctcccccagcccttgggaccatcttctcctgcagtcccctgggccccagtgagaggggcaggggcagggccggcagtaggtggggcctgtggtccccccactgccctgagggcattagctggtctaactgcccggaggcacccggccctgggccttaggcacctcaaggacttttctgctatttactgctcttattgttaaggataataattaaggatcatatgaataattaatgaagatgctgatgactatgaataataaataattatcctgaggaga

SEQ ID NO: 699 - DNA, 3884 bp, Homo sapiens
  source 1..3884: mol_type = genomic DNA
  misc_feature 1..3884: note = cDNA of KCNH2 gene SNP c.2899C>T (p.Pro967Ser)
atgccggtgcggaggggccacgtcgcgccgcagaacaccttcctggacaccatcatccgcaagtttgagggccagagccgtaagttcatcatcgccaacgctcgggtggagaactgcgccgtcatctactgcaacgacggcttctgcgagctgtgcggctactcgcgggccgaggtgatgcagcgaccctgcacctgcgacttcctgcacgggccgcgcacgcagcgccgcgctgccgcgcagatcgcgcaggcactgctgggcgccgaggagcgcaaagtggaaatcgccttctaccggaaagatgggagctgcttcctatgtctggtggatgtggtgcccgtgaagaacgaggatggggctgtcatcatgttcatcctcaatttcgaggtggtgatggagaaggacatggtggggtccccggctcatgacaccaaccaccggggcccccccaccagctggctggccccaggccgcgccaagaccttccgcctgaagctgcccgcgctgctggcgctgacggcccgggagtcgtcggtgcggtcgggcggcgcgggcggcgcgggcgccccgggggccgtggtggtggacgtggacctgacgcccgcggcacccagcagcgagtcgctggccctggacgaagtgacagccatggacaaccacgtggcagggctcgggcccgcggaggagcggcgtgcgctggtgggtcccggctctccgccccgcagcgcgcccggccagctcccatcgccccgggcgcacagcctcaaccccgacgcctcgggctccagctgcagcctggcccggacgcgctcccgagaaagctgcgccagcgtgcgccgcgcctcgtcggccgacgacatcgaggccatgcgcgccggggtgctgcccccgccaccgcgccacgccagcaccggggccatgcacccactgcgcagcggcttgctcaactccacctcggactccgacctcgtgcgctaccgcaccattagcaagattccccaaatcaccctcaactttgtggacctcaagggcgaccccttcttggcttcgcccaccagtgaccgtgagatcatagcacctaagataaaggagcgaacccacaatgtcactgagaaggtcacccaggtcctgtccctgggcgccgacgtgctgcctgagtacaagctgcaggcaccgcgcatccaccgctggaccatcctgcattacagccccttcaaggccgtgtgggactggctcatcctgctgctggtcatctacacggctgtcttcacaccctactcggctgccttcctgctgaaggagacggaagaaggcccgcctgctaccgagtgtggctacgcctgccagccgctggctgtggtggacctcatcgtggacatcatgttcattgtggacatcctcatcaacttccgcaccacctacgtcaatgccaacgaggaggtggtcagccaccccggccgcatcgccgtccactacttcaagggctggttcctcatcgacatggtggccgccatccccttcgacctgctcatcttcggctctggctctgaggagctgatcgggctgctgaagactgcgcggctgctgcggctggtgcgcgtggcgcggaagctggatcgctactcagagtacggcgcggccgtgctgttcttgctcatgtgcacctttgcgctcatcgcgcactggctagcctgcatctggtacgccatcggcaacatggagcagccacacatggactcacgcatcggctggctgcacaacctgggcgaccagataggcaaaccctacaacagcagcggcctgggcggcccctccatcaaggacaagtatgtgacggcgctctacttcaccttcagcagcctcaccagtgtgggcttcggcaacgtctctcccaacaccaactcagagaagatcttctccatctgcgtcatgctcattggctccctcatgtatgctagcatcttcggcaacgtgtcggccatcatccagcggctgtactcgggcacagcccgctaccacacacagatgctgcgggtgcgggagttcatccgcttccaccagatccccaatcccctgcgccagcgcctcgaggagtacttccagcacgcctggtcctacaccaacggcatcgacatgaacgcggtgctgaagggcttccctgagtgcctgcaggctgacatctgcctgcacctgaaccgctcactgctgcagcactgcaaacccttccgaggggccaccaagggctgccttcgggccctggccatgaagttcaagaccacacatgcaccgccaggggacacactggtgcatgctggggacctgctcaccgccctgtacttcatctcccggggctccatcgagatcctgcggggcgacgtcgtcgtggccatcctggggaagaatgacatctttggggagcctctgaacctgtatgcaaggcctggcaagtcgaacggggatgtgcgggccctcacctactgtgacctacacaagatccatcgggacgacctgctggaggtgctggacatgtaccctgagttctccgaccacttctggtccagcctggagatcaccttcaacctgcgagataccaacatgatcccgggctcccccggcagtacggagttagagggtggcttcagtcggcaacgcaagcgcaagttgtccttccgcaggcgcacggacaaggacacggagcagccaggggaggtgtcggccttggggccgggccgggcgggggcagggccgagtagccggggccggccgggggggccgtggggggagagcccgtccagtggcccctccagccctgagagcagtgaggatgagggcccaggccgcagctccagccccctccgcctggtgcccttctccagccccaggccccccggagagtcgccgggtggggagcccctgatggaggactgcgagaagagcagcgacacttgcaaccccctgtcaggcgccttctcaggagtgtccaacattttcagcttctggggggacagtcggggccgccagtaccaggagctccctcgatgccccgcccccacccccagcctcctcaacatccccctctccagcccgggtcggcggccccggggcgacgtggagagcaggctggatgccctccagcgccagctcaacaggctggagacccggctgagtgcagacatggccactgtcctgcagctgctacagaggcagatgacgctggtcccgcccgcctacagtgctgtgaccaccccggggcctggccccacttccacatccccgctgttgcccgtcagccccctccccaccctcaccttggactcgctttctcaggtttcccagttcatggcgtgtgaggagctgcccccgggggccccagagcttccccaagaaggccccacacgacgcctctccctaccgggccagctgggggccctcacctcccagcccctgcacagacacggctcggacccgggcagttagtggggctgcccagtgtggacacgtggctcacccagggatcaaggcgctgctgggccgctccccttggaggccctgctcaggaggccctgaccgtggaaggggagaggaactcgaaagcacagctcctcccccagcccttgggaccatcttctcctgcagtcccctgggccccagtgagaggggcaggggcagggccggcagtaggtggggcctgtggtccccccactgccctgagggcattagctggtctaactgcccggaggcacccggccctgggccttaggcacctcaaggacttttctgctatttactgctcttattgttaaggataataattaaggatcatatgaataattaatgaagatgctgatgactatgaataataaataattatcctgaggaga

SEQ ID NO: 700 - DNA, 3884 bp, Homo sapiens
  source 1..3884: mol_type = genomic DNA
  misc_feature 1..3884: note = cDNA of KCNH2 gene SNP c.2900C>T (p.Pro967Leu)
atgccggtgcggaggggccacgtcgcgccgcagaacaccttcctggacaccatcatccgcaagtttgagggccagagccgtaagttcatcatcgccaacgctcgggtggagaactgcgccgtcatctactgcaacgacggcttctgcgagctgtgcggctactcgcgggccgaggtgatgcagcgaccctgcacctgcgacttcctgcacgggccgcgcacgcagcgccgcgctgccgcgcagatcgcgcaggcactgctgggcgccgaggagcgcaaagtggaaatcgccttctaccggaaagatgggagctgcttcctatgtctggtggatgtggtgcccgtgaagaacgaggatggggctgtcatcatgttcatcctcaatttcgaggtggtgatggagaaggacatggtggggtccccggctcatgacaccaaccaccggggcccccccaccagctggctggccccaggccgcgccaagaccttccgcctgaagctgcccgcgctgctggcgctgacggcccgggagtcgtcggtgcggtcgggcggcgcgggcggcgcgggcgccccgggggccgtggtggtggacgtggacctgacgcccgcggcacccagcagcgagtcgctggccctggacgaagtgacagccatggacaaccacgtggcagggctcgggcccgcggaggagcggcgtgcgctggtgggtcccggctctccgccccgcagcgcgcccggccagctcccatcgccccgggcgcacagcctcaaccccgacgcctcgggctccagctgcagcctggcccggacgcgctcccgagaaagctgcgccagcgtgcgccgcgcctcgtcggccgacgacatcgaggccatgcgcgccggggtgctgcccccgccaccgcgccacgccagcaccggggccatgcacccactgcgcagcggcttgctcaactccacctcggactccgacctcgtgcgctaccgcaccattagcaagattccccaaatcaccctcaactttgtggacctcaagggcgaccccttcttggcttcgcccaccagtgaccgtgagatcatagcacctaagataaaggagcgaacccacaatgtcactgagaaggtcacccaggtcctgtccctgggcgccgacgtgctgcctgagtacaagctgcaggcaccgcgcatccaccgctggaccatcctgcattacagccccttcaaggccgtgtgggactggctcatcctgctgctggtcatctacacggctgtcttcacaccctactcggctgccttcctgctgaaggagacggaagaaggcccgcctgctaccgagtgtggctacgcctgccagccgctggctgtggtggacctcatcgtggacatcatgttcattgtggacatcctcatcaacttccgcaccacctacgtcaatgccaacgaggaggtggtcagccaccccggccgcatcgccgtccactacttcaagggctggttcctcatcgacatggtggccgccatccccttcgacctgctcatcttcggctctggctctgaggagctgatcgggctgctgaagactgcgcggctgctgcggctggtgcgcgtggcgcggaagctggatcgctactcagagtacggcgcggccgtgctgttcttgctcatgtgcacctttgcgctcatcgcgcactggctagcctgcatctggtacgccatcggcaacatggagcagccacacatggactcacgcatcggctggctgcacaacctgggcgaccagataggcaaaccctacaacagcagcggcctgggcggcccctccatcaaggacaagtatgtgacggcgctctacttcaccttcagcagcctcaccagtgtgggcttcggcaacgtctctcccaacaccaactcagagaagatcttctccatctgcgtcatgctcattggctccctcatgtatgctagcatcttcggcaacgtgtcggccatcatccagcggctgtactcgggcacagcccgctaccacacacagatgctgcgggtgcgggagttcatccgcttccaccagatccccaatcccctgcgccagcgcctcgaggagtacttccagcacgcctggtcctacaccaacggcatcgacatgaacgcggtgctgaagggcttccctgagtgcctgcaggctgacatctgcctgcacctgaaccgctcactgctgcagcactgcaaacccttccgaggggccaccaagggctgccttcgggccctggccatgaagttcaagaccacacatgcaccgccaggggacacactggtgcatgctggggacctgctcaccgccctgtacttcatctcccggggctccatcgagatcctgcggggcgacgtcgtcgtggccatcctggggaagaatgacatctttggggagcctctgaacctgtatgcaaggcctggcaagtcgaacggggatgtgcgggccctcacctactgtgacctacacaagatccatcgggacgacctgctggaggtgctggacatgtaccctgagttctccgaccacttctggtccagcctggagatcaccttcaacctgcgagataccaacatgatcccgggctcccccggcagtacggagttagagggtggcttcagtcggcaacgcaagcgcaagttgtccttccgcaggcgcacggacaaggacacggagcagccaggggaggtgtcggccttggggccgggccgggcgggggcagggccgagtagccggggccggccgggggggccgtggggggagagcccgtccagtggcccctccagccctgagagcagtgaggatgagggcccaggccgcagctccagccccctccgcctggtgcccttctccagccccaggccccccggagagctgccgggtggggagcccctgatggaggactgcgagaagagcagcgacacttgcaaccccctgtcaggcgccttctcaggagtgtccaacattttcagcttctggggggacagtcggggccgccagtaccaggagctccctcgatgccccgcccccacccccagcctcctcaacatccccctctccagcccgggtcggcggccccggggcgacgtggagagcaggctggatgccctccagcgccagctcaacaggctggagacccggctgagtgcagacatggccactgtcctgcagctgctacagaggcagatgacgctggtcccgcccgcctacagtgctgtgaccaccccggggcctggccccacttccacatccccgctgttgcccgtcagccccctccccaccctcaccttggactcgctttctcaggtttcccagttcatggcgtgtgaggagctgcccccgggggccccagagcttccccaagaaggccccacacgacgcctctccctaccgggccagctgggggccctcacctcccagcccctgcacagacacggctcggacccgggcagttagtggggctgcccagtgtggacacgtggctcacccagggatcaaggcgctgctgggccgctccccttggaggccctgctcaggaggccctgaccgtggaaggggagaggaactcgaaagcacagctcctcccccagcccttgggaccatcttctcctgcagtcccctgggccccagtgagaggggcaggggcagggccggcagtaggtggggcctgtggtccccccactgccctgagggcattagctggtctaactgcccggaggcacccggccctgggccttaggcacctcaaggacttttctgctatttactgctcttattgttaaggataataattaaggatcatatgaataattaatgaagatgctgatgactatgaataataaataattatcctgaggaga

SEQ ID NO: 701 - DNA, 3884 bp, Homo sapiens
  source 1..3884: mol_type = genomic DNA
  misc_feature 1..3884: note = cDNA of KCNH2 gene SNP c.2902C>G (p.Pro968Ala)
atgccggtgcggaggggccacgtcgcgccgcagaacaccttcctggacaccatcatccgcaagtttgagggccagagccgtaagttcatcatcgccaacgctcgggtggagaactgcgccgtcatctactgcaacgacggcttctgcgagctgtgcggctactcgcgggccgaggtgatgcagcgaccctgcacctgcgacttcctgcacgggccgcgcacgcagcgccgcgctgccgcgcagatcgcgcaggcactgctgggcgccgaggagcgcaaagtggaaatcgccttctaccggaaagatgggagctgcttcctatgtctggtggatgtggtgcccgtgaagaacgaggatggggctgtcatcatgttcatcctcaatttcgaggtggtgatggagaaggacatggtggggtccccggctcatgacaccaaccaccggggcccccccaccagctggctggccccaggccgcgccaagaccttccgcctgaagctgcccgcgctgctggcgctgacggcccgggagtcgtcggtgcggtcgggcggcgcgggcggcgcgggcgccccgggggccgtggtggtggacgtggacctgacgcccgcggcacccagcagcgagtcgctggccctggacgaagtgacagccatggacaaccacgtggcagggctcgggcccgcggaggagcggcgtgcgctggtgggtcccggctctccgccccgcagcgcgcccggccagctcccatcgccccgggcgcacagcctcaaccccgacgcctcgggctccagctgcagcctggcccggacgcgctcccgagaaagctgcgccagcgtgcgccgcgcctcgtcggccgacgacatcgaggccatgcgcgccggggtgctgcccccgccaccgcgccacgccagcaccggggccatgcacccactgcgcagcggcttgctcaactccacctcggactccgacctcgtgcgctaccgcaccattagcaagattccccaaatcaccctcaactttgtggacctcaagggcgaccccttcttggcttcgcccaccagtgaccgtgagatcatagcacctaagataaaggagcgaacccacaatgtcactgagaaggtcacccaggtcctgtccctgggcgccgacgtgctgcctgagtacaagctgcaggcaccgcgcatccaccgctggaccatcctgcattacagccccttcaaggccgtgtgggactggctcatcctgctgctggtcatctacacggctgtcttcacaccctactcggctgccttcctgctgaaggagacggaagaaggcccgcctgctaccgagtgtggctacgcctgccagccgctggctgtggtggacctcatcgtggacatcatgttcattgtggacatcctcatcaacttccgcaccacctacgtcaatgccaacgaggaggtggtcagccaccccggccgcatcgccgtccactacttcaagggctggttcctcatcgacatggtggccgccatccccttcgacctgctcatcttcggctctggctctgaggagctgatcgggctgctgaagactgcgcggctgctgcggctggtgcgcgtggcgcggaagctggatcgctactcagagtacggcgcggccgtgctgttcttgctcatgtgcacctttgcgctcatcgcgcactggctagcctgcatctggtacgccatcggcaacatggagcagccacacatggactcacgcatcggctggctgcacaacctgggcgaccagataggcaaaccctacaacagcagcggcctgggcggcccctccatcaaggacaagtatgtgacggcgctctacttcaccttcagcagcctcaccagtgtgggcttcggcaacgtctctcccaacaccaactcagagaagatcttctccatctgcgtcatgctcattggctccctcatgtatgctagcatcttcggcaacgtgtcggccatcatccagcggctgtactcgggcacagcccgctaccacacacagatgctgcgggtgcgggagttcatccgcttccaccagatccccaatcccctgcgccagcgcctcgaggagtacttccagcacgcctggtcctacaccaacggcatcgacatgaacgcggtgctgaagggcttccctgagtgcctgcaggctgacatctgcctgcacctgaaccgctcactgctgcagcactgcaaacccttccgaggggccaccaagggctgccttcgggccctggccatgaagttcaagaccacacatgcaccgccaggggacacactggtgcatgctggggacctgctcaccgccctgtacttcatctcccggggctccatcgagatcctgcggggcgacgtcgtcgtggccatcctggggaagaatgacatctttggggagcctctgaacctgtatgcaaggcctggcaagtcgaacggggatgtgcgggccctcacctactgtgacctacacaagatccatcgggacgacctgctggaggtgctggacatgtaccctgagttctccgaccacttctggtccagcctggagatcaccttcaacctgcgagataccaacatgatcccgggctcccccggcagtacggagttagagggtggcttcagtcggcaacgcaagcgcaagttgtccttccgcaggcgcacggacaaggacacggagcagccaggggaggtgtcggccttggggccgggccgggcgggggcagggccgagtagccggggccggccgggggggccgtggggggagagcccgtccagtggcccctccagccctgagagcagtgaggatgagggcccaggccgcagctccagccccctccgcctggtgcccttctccagccccaggccccccggagagccggcgggtggggagcccctgatggaggactgcgagaagagcagcgacacttgcaaccccctgtcaggcgccttctcaggagtgtccaacattttcagcttctggggggacagtcggggccgccagtaccaggagctccctcgatgccccgcccccacccccagcctcctcaacatccccctctccagcccgggtcggcggccccggggcgacgtggagagcaggctggatgccctccagcgccagctcaacaggctggagacccggctgagtgcagacatggccactgtcctgcagctgctacagaggcagatgacgctggtcccgcccgcctacagtgctgtgaccaccccggggcctggccccacttccacatccccgctgttgcccgtcagccccctccccaccctcaccttggactcgctttctcaggtttcccagttcatggcgtgtgaggagctgcccccgggggccccagagcttccccaagaaggccccacacgacgcctctccctaccgggccagctgggggccctcacctcccagcccctgcacagacacggctcggacccgggcagttagtggggctgcccagtgtggacacgtggctcacccagggatcaaggcgctgctgggccgctccccttggaggccctgctcaggaggccctgaccgtggaaggggagaggaactcgaaagcacagctcctcccccagcccttgggaccatcttctcctgcagtcccctgggccccagtgagaggggcaggggcagggccggcagtaggtggggcctgtggtccccccactgccctgagggcattagctggtctaactgcccggaggcacccggccctgggccttaggcacctcaaggacttttctgctatttactgctcttattgttaaggataataattaaggatcatatgaataattaatgaagatgctgatgactatgaataataaataattatcctgaggaga

SEQ ID NO: 702 - DNA, 3884 bp, Homo sapiens
  source 1..3884: mol_type = genomic DNA
  misc_feature 1..3884: note = cDNA of KCNH2 gene SNP c.2903C>T (p.Pro968Leu)
atgccggtgcggaggggccacgtcgcgccgcagaacaccttcctggacaccatcatccgcaagtttgagggccagagccgtaagttcatcatcgccaacgctcgggtggagaactgcgccgtcatctactgcaacgacggcttctgcgagctgtgcggctactcgcgggccgaggtgatgcagcgaccctgcacctgcgacttcctgcacgggccgcgcacgcagcgccgcgctgccgcgcagatcgcgcaggcactgctgggcgccgaggagcgcaaagtggaaatcgccttctaccggaaagatgggagctgcttcctatgtctggtggatgtggtgcccgtgaagaacgaggatggggctgtcatcatgttcatcctcaatttcgaggtggtgatggagaaggacatggtggggtccccggctcatgacaccaaccaccggggcccccccaccagctggctggccccaggccgcgccaagaccttccgcctgaagctgcccgcgctgctggcgctgacggcccgggagtcgtcggtgcggtcgggcggcgcgggcggcgcgggcgccccgggggccgtggtggtggacgtggacctgacgcccgcggcacccagcagcgagtcgctggccctggacgaagtgacagccatggacaaccacgtggcagggctcgggcccgcggaggagcggcgtgcgctggtgggtcccggctctccgccccgcagcgcgcccggccagctcccatcgccccgggcgcacagcctcaaccccgacgcctcgggctccagctgcagcctggcccggacgcgctcccgagaaagctgcgccagcgtgcgccgcgcctcgtcggccgacgacatcgaggccatgcgcgccggggtgctgcccccgccaccgcgccacgccagcaccggggccatgcacccactgcgcagcggcttgctcaactccacctcggactccgacctcgtgcgctaccgcaccattagcaagattccccaaatcaccctcaactttgtggacctcaagggcgaccccttcttggcttcgcccaccagtgaccgtgagatcatagcacctaagataaaggagcgaacccacaatgtcactgagaaggtcacccaggtcctgtccctgggcgccgacgtgctgcctgagtacaagctgcaggcaccgcgcatccaccgctggaccatcctgcattacagccccttcaaggccgtgtgggactggctcatcctgctgctggtcatctacacggctgtcttcacaccctactcggctgccttcctgctgaaggagacggaagaaggcccgcctgctaccgagtgtggctacgcctgccagccgctggctgtggtggacctcatcgtggacatcatgttcattgtggacatcctcatcaacttccgcaccacctacgtcaatgccaacgaggaggtggtcagccaccccggccgcatcgccgtccactacttcaagggctggttcctcatcgacatggtggccgccatccccttcgacctgctcatcttcggctctggctctgaggagctgatcgggctgctgaagactgcgcggctgctgcggctggtgcgcgtggcgcggaagctggatcgctactcagagtacggcgcggccgtgctgttcttgctcatgtgcacctttgcgctcatcgcgcactggctagcctgcatctggtacgccatcggcaacatggagcagccacacatggactcacgcatcggctggctgcacaacctgggcgaccagataggcaaaccctacaacagcagcggcctgggcggcccctccatcaaggacaagtatgtgacggcgctctacttcaccttcagcagcctcaccagtgtgggcttcggcaacgtctctcccaacaccaactcagagaagatcttctccatctgcgtcatgctcattggctccctcatgtatgctagcatcttcggcaacgtgtcggccatcatccagcggctgtactcgggcacagcccgctaccacacacagatgctgcgggtgcgggagttcatccgcttccaccagatccccaatcccctgcgccagcgcctcgaggagtacttccagcacgcctggtcctacaccaacggcatcgacatgaacgcggtgctgaagggcttccctgagtgcctgcaggctgacatctgcctgcacctgaaccgctcactgctgcagcactgcaaacccttccgaggggccaccaagggctgccttcgggccctggccatgaagttcaagaccacacatgcaccgccaggggacacactggtgcatgctggggacctgctcaccgccctgtacttcatctcccggggctccatcgagatcctgcggggcgacgtcgtcgtggccatcctggggaagaatgacatctttggggagcctctgaacctgtatgcaaggcctggcaagtcgaacggggatgtgcgggccctcacctactgtgacctacacaagatccatcgggacgacctgctggaggtgctggacatgtaccctgagttctccgaccacttctggtccagcctggagatcaccttcaacctgcgagataccaacatgatcccgggctcccccggcagtacggagttagagggtggcttcagtcggcaacgcaagcgcaagttgtccttccgcaggcgcacggacaaggacacggagcagccaggggaggtgtcggccttggggccgggccgggcgggggcagggccgagtagccggggccggccgggggggccgtggggggagagcccgtccagtggcccctccagccctgagagcagtgaggatgagggcccaggccgcagctccagccccctccgcctggtgcccttctccagccccaggccccccggagagccgctgggtggggagcccctgatggaggactgcgagaagagcagcgacacttgcaaccccctgtcaggcgccttctcaggagtgtccaacattttcagcttctggggggacagtcggggccgccagtaccaggagctccctcgatgccccgcccccacccccagcctcctcaacatccccctctccagcccgggtcggcggccccggggcgacgtggagagcaggctggatgccctccagcgccagctcaacaggctggagacccggctgagtgcagacatggccactgtcctgcagctgctacagaggcagatgacgctggtcccgcccgcctacagtgctgtgaccaccccggggcctggccccacttccacatccccgctgttgcccgtcagccccctccccaccctcaccttggactcgctttctcaggtttcccagttcatggcgtgtgaggagctgcccccgggggccccagagcttccccaagaaggccccacacgacgcctctccctaccgggccagctgggggccctcacctcccagcccctgcacagacacggctcggacccgggcagttagtggggctgcccagtgtggacacgtggctcacccagggatcaaggcgctgctgggccgctccccttggaggccctgctcaggaggccctgaccgtggaaggggagaggaactcgaaagcacagctcctcccccagcccttgggaccatcttctcctgcagtcccctgggccccagtgagaggggcaggggcagggccggcagtaggtggggcctgtggtccccccactgccctgagggcattagctggtctaactgcccggaggcacccggccctgggccttaggcacctcaaggacttttctgctatttactgctcttattgttaaggataataattaaggatcatatgaataattaatgaagatgctgatgactatgaataataaataattatcctgaggaga

SEQ ID NO: 703 - DNA, 3884 bp, Homo sapiens
  source 1..3884: mol_type = genomic DNA
  misc_feature 1..3884: note = cDNA of KCNH2 gene SNP c.2906G>A (p.Gly969Asp)
atgccggtgcggaggggccacgtcgcgccgcagaacaccttcctggacaccatcatccgcaagtttgagggccagagccgtaagttcatcatcgccaacgctcgggtggagaactgcgccgtcatctactgcaacgacggcttctgcgagctgtgcggctactcgcgggccgaggtgatgcagcgaccctgcacctgcgacttcctgcacgggccgcgcacgcagcgccgcgctgccgcgcagatcgcgcaggcactgctgggcgccgaggagcgcaaagtggaaatcgccttctaccggaaagatgggagctgcttcctatgtctggtggatgtggtgcccgtgaagaacgaggatggggctgtcatcatgttcatcctcaatttcgaggtggtgatggagaaggacatggtggggtccccggctcatgacaccaaccaccggggcccccccaccagctggctggccccaggccgcgccaagaccttccgcctgaagctgcccgcgctgctggcgctgacggcccgggagtcgtcggtgcggtcgggcggcgcgggcggcgcgggcgccccgggggccgtggtggtggacgtggacctgacgcccgcggcacccagcagcgagtcgctggccctggacgaagtgacagccatggacaaccacgtggcagggctcgggcccgcggaggagcggcgtgcgctggtgggtcccggctctccgccccgcagcgcgcccggccagctcccatcgccccgggcgcacagcctcaaccccgacgcctcgggctccagctgcagcctggcccggacgcgctcccgagaaagctgcgccagcgtgcgccgcgcctcgtcggccgacgacatcgaggccatgcgcgccggggtgctgcccccgccaccgcgccacgccagcaccggggccatgcacccactgcgcagcggcttgctcaactccacctcggactccgacctcgtgcgctaccgcaccattagcaagattccccaaatcaccctcaactttgtggacctcaagggcgaccccttcttggcttcgcccaccagtgaccgtgagatcatagcacctaagataaaggagcgaacccacaatgtcactgagaaggtcacccaggtcctgtccctgggcgccgacgtgctgcctgagtacaagctgcaggcaccgcgcatccaccgctggaccatcctgcattacagccccttcaaggccgtgtgggactggctcatcctgctgctggtcatctacacggctgtcttcacaccctactcggctgccttcctgctgaaggagacggaagaaggcccgcctgctaccgagtgtggctacgcctgccagccgctggctgtggtggacctcatcgtggacatcatgttcattgtggacatcctcatcaacttccgcaccacctacgtcaatgccaacgaggaggtggtcagccaccccggccgcatcgccgtccactacttcaagggctggttcctcatcgacatggtggccgccatccccttcgacctgctcatcttcggctctggctctgaggagctgatcgggctgctgaagactgcgcggctgctgcggctggtgcgcgtggcgcggaagctggatcgctactcagagtacggcgcggccgtgctgttcttgctcatgtgcacctttgcgctcatcgcgcactggctagcctgcatctggtacgccatcggcaacatggagcagccacacatggactcacgcatcggctggctgcacaacctgggcgaccagataggcaaaccctacaacagcagcggcctgggcggcccctccatcaaggacaagtatgtgacggcgctctacttcaccttcagcagcctcaccagtgtgggcttcggcaacgtctctcccaacaccaactcagagaagatcttctccatctgcgtcatgctcattggctccctcatgtatgctagcatcttcggcaacgtgtcggccatcatccagcggctgtactcgggcacagcccgctaccacacacagatgctgcgggtgcgggagttcatccgcttccaccagatccccaatcccctgcgccagcgcctcgaggagtacttccagcacgcctggtcctacaccaacggcatcgacatgaacgcggtgctgaagggcttccctgagtgcctgcaggctgacatctgcctgcacctgaaccgctcactgctgcagcactgcaaacccttccgaggggccaccaagggctgccttcgggccctggccatgaagttcaagaccacacatgcaccgccaggggacacactggtgcatgctggggacctgctcaccgccctgtacttcatctcccggggctccatcgagatcctgcggggcgacgtcgtcgtggccatcctggggaagaatgacatctttggggagcctctgaacctgtatgcaaggcctggcaagtcgaacggggatgtgcgggccctcacctactgtgacctacacaagatccatcgggacgacctgctggaggtgctggacatgtaccctgagttctccgaccacttctggtccagcctggagatcaccttcaacctgcgagataccaacatgatcccgggctcccccggcagtacggagttagagggtggcttcagtcggcaacgcaagcgcaagttgtccttccgcaggcgcacggacaaggacacggagcagccaggggaggtgtcggccttggggccgggccgggcgggggcagggccgagtagccggggccggccgggggggccgtggggggagagcccgtccagtggcccctccagccctgagagcagtgaggatgagggcccaggccgcagctccagccccctccgcctggtgcccttctccagccccaggccccccggagagccgccggatggggagcccctgatggaggactgcgagaagagcagcgacacttgcaaccccctgtcaggcgccttctcaggagtgtccaacattttcagcttctggggggacagtcggggccgccagtaccaggagctccctcgatgccccgcccccacccccagcctcctcaacatccccctctccagcccgggtcggcggccccggggcgacgtggagagcaggctggatgccctccagcgccagctcaacaggctggagacccggctgagtgcagacatggccactgtcctgcagctgctacagaggcagatgacgctggtcccgcccgcctacagtgctgtgaccaccccggggcctggccccacttccacatccccgctgttgcccgtcagccccctccccaccctcaccttggactcgctttctcaggtttcccagttcatggcgtgtgaggagctgcccccgggggccccagagcttccccaagaaggccccacacgacgcctctccctaccgggccagctgggggccctcacctcccagcccctgcacagacacggctcggacccgggcagttagtggggctgcccagtgtggacacgtggctcacccagggatcaaggcgctgctgggccgctccccttggaggccctgctcaggaggccctgaccgtggaaggggagaggaactcgaaagcacagctcctcccccagcccttgggaccatcttctcctgcagtcccctgggccccagtgagaggggcaggggcagggccggcagtaggtggggcctgtggtccccccactgccctgagggcattagctggtctaactgcccggaggcacccggccctgggccttaggcacctcaaggacttttctgctatttactgctcttattgttaaggataataattaaggatcatatgaataattaatgaagatgctgatgactatgaataataaataattatcctgaggaga

SEQ ID NO: 704 - DNA, 3884 bp, Homo sapiens
  source 1..3884: mol_type = genomic DNA
  misc_feature 1..3884: note = cDNA of KCNH2 gene SNP c.2906G>T (p.Gly969Val)
atgccggtgcggaggggccacgtcgcgccgcagaacaccttcctggacaccatcatccgcaagtttgagggccagagccgtaagttcatcatcgccaacgctcgggtggagaactgcgccgtcatctactgcaacgacggcttctgcgagctgtgcggctactcgcgggccgaggtgatgcagcgaccctgcacctgcgacttcctgcacgggccgcgcacgcagcgccgcgctgccgcgcagatcgcgcaggcactgctgggcgccgaggagcgcaaagtggaaatcgccttctaccggaaagatgggagctgcttcctatgtctggtggatgtggtgcccgtgaagaacgaggatggggctgtcatcatgttcatcctcaatttcgaggtggtgatggagaaggacatggtggggtccccggctcatgacaccaaccaccggggcccccccaccagctggctggccccaggccgcgccaagaccttccgcctgaagctgcccgcgctgctggcgctgacggcccgggagtcgtcggtgcggtcgggcggcgcgggcggcgcgggcgccccgggggccgtggtggtggacgtggacctgacgcccgcggcacccagcagcgagtcgctggccctggacgaagtgacagccatggacaaccacgtggcagggctcgggcccgcggaggagcggcgtgcgctggtgggtcccggctctccgccccgcagcgcgcccggccagctcccatcgccccgggcgcacagcctcaaccccgacgcctcgggctccagctgcagcctggcccggacgcgctcccgagaaagctgcgccagcgtgcgccgcgcctcgtcggccgacgacatcgaggccatgcgcgccggggtgctgcccccgccaccgcgccacgccagcaccggggccatgcacccactgcgcagcggcttgctcaactccacctcggactccgacctcgtgcgctaccgcaccattagcaagattccccaaatcaccctcaactttgtggacctcaagggcgaccccttcttggcttcgcccaccagtgaccgtgagatcatagcacctaagataaaggagcgaacccacaatgtcactgagaaggtcacccaggtcctgtccctgggcgccgacgtgctgcctgagtacaagctgcaggcaccgcgcatccaccgctggaccatcctgcattacagccccttcaaggccgtgtgggactggctcatcctgctgctggtcatctacacggctgtcttcacaccctactcggctgccttcctgctgaaggagacggaagaaggcccgcctgctaccgagtgtggctacgcctgccagccgctggctgtggtggacctcatcgtggacatcatgttcattgtggacatcctcatcaacttccgcaccacctacgtcaatgccaacgaggaggtggtcagccaccccggccgcatcgccgtccactacttcaagggctggttcctcatcgacatggtggccgccatccccttcgacctgctcatcttcggctctggctctgaggagctgatcgggctgctgaagactgcgcggctgctgcggctggtgcgcgtggcgcggaagctggatcgctactcagagtacggcgcggccgtgctgttcttgctcatgtgcacctttgcgctcatcgcgcactggctagcctgcatctggtacgccatcggcaacatggagcagccacacatggactcacgcatcggctggctgcacaacctgggcgaccagataggcaaaccctacaacagcagcggcctgggcggcccctccatcaaggacaagtatgtgacggcgctctacttcaccttcagcagcctcaccagtgtgggcttcggcaacgtctctcccaacaccaactcagagaagatcttctccatctgcgtcatgctcattggctccctcatgtatgctagcatcttcggcaacgtgtcggccatcatccagcggctgtactcgggcacagcccgctaccacacacagatgctgcgggtgcgggagttcatccgcttccaccagatccccaatcccctgcgccagcgcctcgaggagtacttccagcacgcctggtcctacaccaacggcatcgacatgaacgcggtgctgaagggcttccctgagtgcctgcaggctgacatctgcctgcacctgaaccgctcactgctgcagcactgcaaacccttccgaggggccaccaagggctgccttcgggccctggccatgaagttcaagaccacacatgcaccgccaggggacacactggtgcatgctggggacctgctcaccgccctgtacttcatctcccggggctccatcgagatcctgcggggcgacgtcgtcgtggccatcctggggaagaatgacatctttggggagcctctgaacctgtatgcaaggcctggcaagtcgaacggggatgtgcgggccctcacctactgtgacctacacaagatccatcgggacgacctgctggaggtgctggacatgtaccctgagttctccgaccacttctggtccagcctggagatcaccttcaacctgcgagataccaacatgatcccgggctcccccggcagtacggagttagagggtggcttcagtcggcaacgcaagcgcaagttgtccttccgcaggcgcacggacaaggacacggagcagccaggggaggtgtcggccttggggccgggccgggcgggggcagggccgagtagccggggccggccgggggggccgtggggggagagcccgtccagtggcccctccagccctgagagcagtgaggatgagggcccaggccgcagctccagccccctccgcctggtgcccttctccagccccaggccccccggagagccgccggttggggagcccctgatggaggactgcgagaagagcagcgacacttgcaaccccctgtcaggcgccttctcaggagtgtccaacattttcagcttctggggggacagtcggggccgccagtaccaggagctccctcgatgccccgcccccacccccagcctcctcaacatccccctctccagcccgggtcggcggccccggggcgacgtggagagcaggctggatgccctccagcgccagctcaacaggctggagacccggctgagtgcagacatggccactgtcctgcagctgctacagaggcagatgacgctggtcccgcccgcctacagtgctgtgaccaccccggggcctggccccacttccacatccccgctgttgcccgtcagccccctccccaccctcaccttggactcgctttctcaggtttcccagttcatggcgtgtgaggagctgcccccgggggccccagagcttccccaagaaggccccacacgacgcctctccctaccgggccagctgggggccctcacctcccagcccctgcacagacacggctcggacccgggcagttagtggggctgcccagtgtggacacgtggctcacccagggatcaaggcgctgctgggccgctccccttggaggccctgctcaggaggccctgaccgtggaaggggagaggaactcgaaagcacagctcctcccccagcccttgggaccatcttctcctgcagtcccctgggccccagtgagaggggcaggggcagggccggcagtaggtggggcctgtggtccccccactgccctgagggcattagctggtctaactgcccggaggcacccggccctgggccttaggcacctcaaggacttttctgctatttactgctcttattgttaaggataataattaaggatcatatgaataattaatgaagatgctgatgactatgaataataaataattatcctgaggaga

SEQ ID NO: 705 - DNA, 3884 bp, Homo sapiens
  source 1..3884: mol_type = genomic DNA
  misc_feature 1..3884: note = cDNA of KCNH2 gene SNP c.2908G>A (p.Gly970Arg)
atgccggtgcggaggggccacgtcgcgccgcagaacaccttcctggacaccatcatccgcaagtttgagggccagagccgtaagttcatcatcgccaacgctcgggtggagaactgcgccgtcatctactgcaacgacggcttctgcgagctgtgcggctactcgcgggccgaggtgatgcagcgaccctgcacctgcgacttcctgcacgggccgcgcacgcagcgccgcgctgccgcgcagatcgcgcaggcactgctgggcgccgaggagcgcaaagtggaaatcgccttctaccggaaagatgggagctgcttcctatgtctggtggatgtggtgcccgtgaagaacgaggatggggctgtcatcatgttcatcctcaatttcgaggtggtgatggagaaggacatggtggggtccccggctcatgacaccaaccaccggggcccccccaccagctggctggccccaggccgcgccaagaccttccgcctgaagctgcccgcgctgctggcgctgacggcccgggagtcgtcggtgcggtcgggcggcgcgggcggcgcgggcgccccgggggccgtggtggtggacgtggacctgacgcccgcggcacccagcagcgagtcgctggccctggacgaagtgacagccatggacaaccacgtggcagggctcgggcccgcggaggagcggcgtgcgctggtgggtcccggctctccgccccgcagcgcgcccggccagctcccatcgccccgggcgcacagcctcaaccccgacgcctcgggctccagctgcagcctggcccggacgcgctcccgagaaagctgcgccagcgtgcgccgcgcctcgtcggccgacgacatcgaggccatgcgcgccggggtgctgcccccgccaccgcgccacgccagcaccggggccatgcacccactgcgcagcggcttgctcaactccacctcggactccgacctcgtgcgctaccgcaccattagcaagattccccaaatcaccctcaactttgtggacctcaagggcgaccccttcttggcttcgcccaccagtgaccgtgagatcatagcacctaagataaaggagcgaacccacaatgtcactgagaaggtcacccaggtcctgtccctgggcgccgacgtgctgcctgagtacaagctgcaggcaccgcgcatccaccgctggaccatcctgcattacagccccttcaaggccgtgtgggactggctcatcctgctgctggtcatctacacggctgtcttcacaccctactcggctgccttcctgctgaaggagacggaagaaggcccgcctgctaccgagtgtggctacgcctgccagccgctggctgtggtggacctcatcgtggacatcatgttcattgtggacatcctcatcaacttccgcaccacctacgtcaatgccaacgaggaggtggtcagccaccccggccgcatcgccgtccactacttcaagggctggttcctcatcgacatggtggccgccatccccttcgacctgctcatcttcggctctggctctgaggagctgatcgggctgctgaagactgcgcggctgctgcggctggtgcgcgtggcgcggaagctggatcgctactcagagtacggcgcggccgtgctgttcttgctcatgtgcacctttgcgctcatcgcgcactggctagcctgcatctggtacgccatcggcaacatggagcagccacacatggactcacgcatcggctggctgcacaacctgggcgaccagataggcaaaccctacaacagcagcggcctgggcggcccctccatcaaggacaagtatgtgacggcgctctacttcaccttcagcagcctcaccagtgtgggcttcggcaacgtctctcccaacaccaactcagagaagatcttctccatctgcgtcatgctcattggctccctcatgtatgctagcatcttcggcaacgtgtcggccatcatccagcggctgtactcgggcacagcccgctaccacacacagatgctgcgggtgcgggagttcatccgcttccaccagatccccaatcccctgcgccagcgcctcgaggagtacttccagcacgcctggtcctacaccaacggcatcgacatgaacgcggtgctgaagggcttccctgagtgcctgcaggctgacatctgcctgcacctgaaccgctcactgctgcagcactgcaaacccttccgaggggccaccaagggctgccttcgggccctggccatgaagttcaagaccacacatgcaccgccaggggacacactggtgcatgctggggacctgctcaccgccctgtacttcatctcccggggctccatcgagatcctgcggggcgacgtcgtcgtggccatcctggggaagaatgacatctttggggagcctctgaacctgtatgcaaggcctggcaagtcgaacggggatgtgcgggccctcacctactgtgacctacacaagatccatcgggacgacctgctggaggtgctggacatgtaccctgagttctccgaccacttctggtccagcctggagatcaccttcaacctgcgagataccaacatgatcccgggctcccccggcagtacggagttagagggtggcttcagtcggcaacgcaagcgcaagttgtccttccgcaggcgcacggacaaggacacggagcagccaggggaggtgtcggccttggggccgggccgggcgggggcagggccgagtagccggggccggccgggggggccgtggggggagagcccgtccagtggcccctccagccctgagagcagtgaggatgagggcccaggccgcagctccagccccctccgcctggtgcccttctccagccccaggccccccggagagccgccgggtagggagcccctgatggaggactgcgagaagagcagcgacacttgcaaccccctgtcaggcgccttctcaggagtgtccaacattttcagcttctggggggacagtcggggccgccagtaccaggagctccctcgatgccccgcccccacccccagcctcctcaacatccccctctccagcccgggtcggcggccccggggcgacgtggagagcaggctggatgccctccagcgccagctcaacaggctggagacccggctgagtgcagacatggccactgtcctgcagctgctacagaggcagatgacgctggtcccgcccgcctacagtgctgtgaccaccccggggcctggccccacttccacatccccgctgttgcccgtcagccccctccccaccctcaccttggactcgctttctcaggtttcccagttcatggcgtgtgaggagctgcccccgggggccccagagcttccccaagaaggccccacacgacgcctctccctaccgggccagctgggggccctcacctcccagcccctgcacagacacggctcggacccgggcagttagtggggctgcccagtgtggacacgtggctcacccagggatcaaggcgctgctgggccgctccccttggaggccctgctcaggaggccctgaccgtggaaggggagaggaactcgaaagcacagctcctcccccagcccttgggaccatcttctcctgcagtcccctgggccccagtgagaggggcaggggcagggccggcagtaggtggggcctgtggtccccccactgccctgagggcattagctggtctaactgcccggaggcacccggccctgggccttaggcacctcaaggacttttctgctatttactgctcttattgttaaggataataattaaggatcatatgaataattaatgaagatgctgatgactatgaataataaataattatcctgaggaga

SEQ ID NO: 706 - DNA, 3884 bp, Homo sapiens
  source 1..3884: mol_type = genomic DNA
  misc_feature 1..3884: note = cDNA of KCNH2 gene SNP c.290C>G (p.Ala97Gly)
atgccggtgcggaggggccacgtcgcgccgcagaacaccttcctggacaccatcatccgcaagtttgagggccagagccgtaagttcatcatcgccaacgctcgggtggagaactgcgccgtcatctactgcaacgacggcttctgcgagctgtgcggctactcgcgggccgaggtgatgcagcgaccctgcacctgcgacttcctgcacgggccgcgcacgcagcgccgcgctgccgcgcagatcgcgcaggcactgctgggcgccgaggagcgcaaagtggaaatcggcttctaccggaaagatgggagctgcttcctatgtctggtggatgtggtgcccgtgaagaacgaggatggggctgtcatcatgttcatcctcaatttcgaggtggtgatggagaaggacatggtggggtccccggctcatgacaccaaccaccggggcccccccaccagctggctggccccaggccgcgccaagaccttccgcctgaagctgcccgcgctgctggcgctgacggcccgggagtcgtcggtgcggtcgggcggcgcgggcggcgcgggcgccccgggggccgtggtggtggacgtggacctgacgcccgcggcacccagcagcgagtcgctggccctggacgaagtgacagccatggacaaccacgtggcagggctcgggcccgcggaggagcggcgtgcgctggtgggtcccggctctccgccccgcagcgcgcccggccagctcccatcgccccgggcgcacagcctcaaccccgacgcctcgggctccagctgcagcctggcccggacgcgctcccgagaaagctgcgccagcgtgcgccgcgcctcgtcggccgacgacatcgaggccatgcgcgccggggtgctgcccccgccaccgcgccacgccagcaccggggccatgcacccactgcgcagcggcttgctcaactccacctcggactccgacctcgtgcgctaccgcaccattagcaagattccccaaatcaccctcaactttgtggacctcaagggcgaccccttcttggcttcgcccaccagtgaccgtgagatcatagcacctaagataaaggagcgaacccacaatgtcactgagaaggtcacccaggtcctgtccctgggcgccgacgtgctgcctgagtacaagctgcaggcaccgcgcatccaccgctggaccatcctgcattacagccccttcaaggccgtgtgggactggctcatcctgctgctggtcatctacacggctgtcttcacaccctactcggctgccttcctgctgaaggagacggaagaaggcccgcctgctaccgagtgtggctacgcctgccagccgctggctgtggtggacctcatcgtggacatcatgttcattgtggacatcctcatcaacttccgcaccacctacgtcaatgccaacgaggaggtggtcagccaccccggccgcatcgccgtccactacttcaagggctggttcctcatcgacatggtggccgccatccccttcgacctgctcatcttcggctctggctctgaggagctgatcgggctgctgaagactgcgcggctgctgcggctggtgcgcgtggcgcggaagctggatcgctactcagagtacggcgcggccgtgctgttcttgctcatgtgcacctttgcgctcatcgcgcactggctagcctgcatctggtacgccatcggcaacatggagcagccacacatggactcacgcatcggctggctgcacaacctgggcgaccagataggcaaaccctacaacagcagcggcctgggcggcccctccatcaaggacaagtatgtgacggcgctctacttcaccttcagcagcctcaccagtgtgggcttcggcaacgtctctcccaacaccaactcagagaagatcttctccatctgcgtcatgctcattggctccctcatgtatgctagcatcttcggcaacgtgtcggccatcatccagcggctgtactcgggcacagcccgctaccacacacagatgctgcgggtgcgggagttcatccgcttccaccagatccccaatcccctgcgccagcgcctcgaggagtacttccagcacgcctggtcctacaccaacggcatcgacatgaacgcggtgctgaagggcttccctgagtgcctgcaggctgacatctgcctgcacctgaaccgctcactgctgcagcactgcaaacccttccgaggggccaccaagggctgccttcgggccctggccatgaagttcaagaccacacatgcaccgccaggggacacactggtgcatgctggggacctgctcaccgccctgtacttcatctcccggggctccatcgagatcctgcggggcgacgtcgtcgtggccatcctggggaagaatgacatctttggggagcctctgaacctgtatgcaaggcctggcaagtcgaacggggatgtgcgggccctcacctactgtgacctacacaagatccatcgggacgacctgctggaggtgctggacatgtaccctgagttctccgaccacttctggtccagcctggagatcaccttcaacctgcgagataccaacatgatcccgggctcccccggcagtacggagttagagggtggcttcagtcggcaacgcaagcgcaagttgtccttccgcaggcgcacggacaaggacacggagcagccaggggaggtgtcggccttggggccgggccgggcgggggcagggccgagtagccggggccggccgggggggccgtggggggagagcccgtccagtggcccctccagccctgagagcagtgaggatgagggcccaggccgcagctccagccccctccgcctggtgcccttctccagccccaggccccccggagagccgccgggtggggagcccctgatggaggactgcgagaagagcagcgacacttgcaaccccctgtcaggcgccttctcaggagtgtccaacattttcagcttctggggggacagtcggggccgccagtaccaggagctccctcgatgccccgcccccacccccagcctcctcaacatccccctctccagcccgggtcggcggccccggggcgacgtggagagcaggctggatgccctccagcgccagctcaacaggctggagacccggctgagtgcagacatggccactgtcctgcagctgctacagaggcagatgacgctggtcccgcccgcctacagtgctgtgaccaccccggggcctggccccacttccacatccccgctgttgcccgtcagccccctccccaccctcaccttggactcgctttctcaggtttcccagttcatggcgtgtgaggagctgcccccgggggccccagagcttccccaagaaggccccacacgacgcctctccctaccgggccagctgggggccctcacctcccagcccctgcacagacacggctcggacccgggcagttagtggggctgcccagtgtggacacgtggctcacccagggatcaaggcgctgctgggccgctccccttggaggccctgctcaggaggccctgaccgtggaaggggagaggaactcgaaagcacagctcctcccccagcccttgggaccatcttctcctgcagtcccctgggccccagtgagaggggcaggggcagggccggcagtaggtggggcctgtggtccccccactgccctgagggcattagctggtctaactgcccggaggcacccggccctgggccttaggcacctcaaggacttttctgctatttactgctcttattgttaaggataataattaaggatcatatgaataattaatgaagatgctgatgactatgaataataaataattatcctgaggaga

SEQ ID NO: 707 - DNA, 3884 bp, Homo sapiens
  source 1..3884: mol_type = genomic DNA
  misc_feature 1..3884: note = cDNA of KCNH2 gene SNP c.2913G>T (p.Glu971Asp)
atgccggtgcggaggggccacgtcgcgccgcagaacaccttcctggacaccatcatccgcaagtttgagggccagagccgtaagttcatcatcgccaacgctcgggtggagaactgcgccgtcatctactgcaacgacggcttctgcgagctgtgcggctactcgcgggccgaggtgatgcagcgaccctgcacctgcgacttcctgcacgggccgcgcacgcagcgccgcgctgccgcgcagatcgcgcaggcactgctgggcgccgaggagcgcaaagtggaaatcgccttctaccggaaagatgggagctgcttcctatgtctggtggatgtggtgcccgtgaagaacgaggatggggctgtcatcatgttcatcctcaatttcgaggtggtgatggagaaggacatggtggggtccccggctcatgacaccaaccaccggggcccccccaccagctggctggccccaggccgcgccaagaccttccgcctgaagctgcccgcgctgctggcgctgacggcccgggagtcgtcggtgcggtcgggcggcgcgggcggcgcgggcgccccgggggccgtggtggtggacgtggacctgacgcccgcggcacccagcagcgagtcgctggccctggacgaagtgacagccatggacaaccacgtggcagggctcgggcccgcggaggagcggcgtgcgctggtgggtcccggctctccgccccgcagcgcgcccggccagctcccatcgccccgggcgcacagcctcaaccccgacgcctcgggctccagctgcagcctggcccggacgcgctcccgagaaagctgcgccagcgtgcgccgcgcctcgtcggccgacgacatcgaggccatgcgcgccggggtgctgcccccgccaccgcgccacgccagcaccggggccatgcacccactgcgcagcggcttgctcaactccacctcggactccgacctcgtgcgctaccgcaccattagcaagattccccaaatcaccctcaactttgtggacctcaagggcgaccccttcttggcttcgcccaccagtgaccgtgagatcatagcacctaagataaaggagcgaacccacaatgtcactgagaaggtcacccaggtcctgtccctgggcgccgacgtgctgcctgagtacaagctgcaggcaccgcgcatccaccgctggaccatcctgcattacagccccttcaaggccgtgtgggactggctcatcctgctgctggtcatctacacggctgtcttcacaccctactcggctgccttcctgctgaaggagacggaagaaggcccgcctgctaccgagtgtggctacgcctgccagccgctggctgtggtggacctcatcgtggacatcatgttcattgtggacatcctcatcaacttccgcaccacctacgtcaatgccaacgaggaggtggtcagccaccccggccgcatcgccgtccactacttcaagggctggttcctcatcgacatggtggccgccatccccttcgacctgctcatcttcggctctggctctgaggagctgatcgggctgctgaagactgcgcggctgctgcggctggtgcgcgtggcgcggaagctggatcgctactcagagtacggcgcggccgtgctgttcttgctcatgtgcacctttgcgctcatcgcgcactggctagcctgcatctggtacgccatcggcaacatggagcagccacacatggactcacgcatcggctggctgcacaacctgggcgaccagataggcaaaccctacaacagcagcggcctgggcggcccctccatcaaggacaagtatgtgacggcgctctacttcaccttcagcagcctcaccagtgtgggcttcggcaacgtctctcccaacaccaactcagagaagatcttctccatctgcgtcatgctcattggctccctcatgtatgctagcatcttcggcaacgtgtcggccatcatccagcggctgtactcgggcacagcccgctaccacacacagatgctgcgggtgcgggagttcatccgcttccaccagatccccaatcccctgcgccagcgcctcgaggagtacttccagcacgcctggtcctacaccaacggcatcgacatgaacgcggtgctgaagggcttccctgagtgcctgcaggctgacatctgcctgcacctgaaccgctcactgctgcagcactgcaaacccttccgaggggccaccaagggctgccttcgggccctggccatgaagttcaagaccacacatgcaccgccaggggacacactggtgcatgctggggacctgctcaccgccctgtacttcatctcccggggctccatcgagatcctgcggggcgacgtcgtcgtggccatcctggggaagaatgacatctttggggagcctctgaacctgtatgcaaggcctggcaagtcgaacggggatgtgcgggccctcacctactgtgacctacacaagatccatcgggacgacctgctggaggtgctggacatgtaccctgagttctccgaccacttctggtccagcctggagatcaccttcaacctgcgagataccaacatgatcccgggctcccccggcagtacggagttagagggtggcttcagtcggcaacgcaagcgcaagttgtccttccgcaggcgcacggacaaggacacggagcagccaggggaggtgtcggccttggggccgggccgggcgggggcagggccgagtagccggggccggccgggggggccgtggggggagagcccgtccagtggcccctccagccctgagagcagtgaggatgagggcccaggccgcagctccagccccctccgcctggtgcccttctccagccccaggccccccggagagccgccgggtggggatcccctgatggaggactgcgagaagagcagcgacacttgcaaccccctgtcaggcgccttctcaggagtgtccaacattttcagcttctggggggacagtcggggccgccagtaccaggagctccctcgatgccccgcccccacccccagcctcctcaacatccccctctccagcccgggtcggcggccccggggcgacgtggagagcaggctggatgccctccagcgccagctcaacaggctggagacccggctgagtgcagacatggccactgtcctgcagctgctacagaggcagatgacgctggtcccgcccgcctacagtgctgtgaccaccccggggcctggccccacttccacatccccgctgttgcccgtcagccccctccccaccctcaccttggactcgctttctcaggtttcccagttcatggcgtgtgaggagctgcccccgggggccccagagcttccccaagaaggccccacacgacgcctctccctaccgggccagctgggggccctcacctcccagcccctgcacagacacggctcggacccgggcagttagtggggctgcccagtgtggacacgtggctcacccagggatcaaggcgctgctgggccgctccccttggaggccctgctcaggaggccctgaccgtggaaggggagaggaactcgaaagcacagctcctcccccagcccttgggaccatcttctcctgcagtcccctgggccccagtgagaggggcaggggcagggccggcagtaggtggggcctgtggtccccccactgccctgagggcattagctggtctaactgcccggaggcacccggccctgggccttaggcacctcaaggacttttctgctatttactgctcttattgttaaggataataattaaggatcatatgaataattaatgaagatgctgatgactatgaataataaataattatcctgaggaga

SEQ ID NO: 708 - DNA, 3884 bp, Homo sapiens
  source 1..3884: mol_type = genomic DNA
  misc_feature 1..3884: note = cDNA of KCNH2 gene SNP c.2926G>A (p.Asp976Asn)
atgccggtgcggaggggccacgtcgcgccgcagaacaccttcctggacaccatcatccgcaagtttgagggccagagccgtaagttcatcatcgccaacgctcgggtggagaactgcgccgtcatctactgcaacgacggcttctgcgagctgtgcggctactcgcgggccgaggtgatgcagcgaccctgcacctgcgacttcctgcacgggccgcgcacgcagcgccgcgctgccgcgcagatcgcgcaggcactgctgggcgccgaggagcgcaaagtggaaatcgccttctaccggaaagatgggagctgcttcctatgtctggtggatgtggtgcccgtgaagaacgaggatggggctgtcatcatgttcatcctcaatttcgaggtggtgatggagaaggacatggtggggtccccggctcatgacaccaaccaccggggcccccccaccagctggctggccccaggccgcgccaagaccttccgcctgaagctgcccgcgctgctggcgctgacggcccgggagtcgtcggtgcggtcgggcggcgcgggcggcgcgggcgccccgggggccgtggtggtggacgtggacctgacgcccgcggcacccagcagcgagtcgctggccctggacgaagtgacagccatggacaaccacgtggcagggctcgggcccgcggaggagcggcgtgcgctggtgggtcccggctctccgccccgcagcgcgcccggccagctcccatcgccccgggcgcacagcctcaaccccgacgcctcgggctccagctgcagcctggcccggacgcgctcccgagaaagctgcgccagcgtgcgccgcgcctcgtcggccgacgacatcgaggccatgcgcgccggggtgctgcccccgccaccgcgccacgccagcaccggggccatgcacccactgcgcagcggcttgctcaactccacctcggactccgacctcgtgcgctaccgcaccattagcaagattccccaaatcaccctcaactttgtggacctcaagggcgaccccttcttggcttcgcccaccagtgaccgtgagatcatagcacctaagataaaggagcgaacccacaatgtcactgagaaggtcacccaggtcctgtccctgggcgccgacgtgctgcctgagtacaagctgcaggcaccgcgcatccaccgctggaccatcctgcattacagccccttcaaggccgtgtgggactggctcatcctgctgctggtcatctacacggctgtcttcacaccctactcggctgccttcctgctgaaggagacggaagaaggcccgcctgctaccgagtgtggctacgcctgccagccgctggctgtggtggacctcatcgtggacatcatgttcattgtggacatcctcatcaacttccgcaccacctacgtcaatgccaacgaggaggtggtcagccaccccggccgcatcgccgtccactacttcaagggctggttcctcatcgacatggtggccgccatccccttcgacctgctcatcttcggctctggctctgaggagctgatcgggctgctgaagactgcgcggctgctgcggctggtgcgcgtggcgcggaagctggatcgctactcagagtacggcgcggccgtgctgttcttgctcatgtgcacctttgcgctcatcgcgcactggctagcctgcatctggtacgccatcggcaacatggagcagccacacatggactcacgcatcggctggctgcacaacctgggcgaccagataggcaaaccctacaacagcagcggcctgggcggcccctccatcaaggacaagtatgtgacggcgctctacttcaccttcagcagcctcaccagtgtgggcttcggcaacgtctctcccaacaccaactcagagaagatcttctccatctgcgtcatgctcattggctccctcatgtatgctagcatcttcggcaacgtgtcggccatcatccagcggctgtactcgggcacagcccgctaccacacacagatgctgcgggtgcgggagttcatccgcttccaccagatccccaatcccctgcgccagcgcctcgaggagtacttccagcacgcctggtcctacaccaacggcatcgacatgaacgcggtgctgaagggcttccctgagtgcctgcaggctgacatctgcctgcacctgaaccgctcactgctgcagcactgcaaacccttccgaggggccaccaagggctgccttcgggccctggccatgaagttcaagaccacacatgcaccgccaggggacacactggtgcatgctggggacctgctcaccgccctgtacttcatctcccggggctccatcgagatcctgcggggcgacgtcgtcgtggccatcctggggaagaatgacatctttggggagcctctgaacctgtatgcaaggcctggcaagtcgaacggggatgtgcgggccctcacctactgtgacctacacaagatccatcgggacgacctgctggaggtgctggacatgtaccctgagttctccgaccacttctggtccagcctggagatcaccttcaacctgcgagataccaacatgatcccgggctcccccggcagtacggagttagagggtggcttcagtcggcaacgcaagcgcaagttgtccttccgcaggcgcacggacaaggacacggagcagccaggggaggtgtcggccttggggccgggccgggcgggggcagggccgagtagccggggccggccgggggggccgtggggggagagcccgtccagtggcccctccagccctgagagcagtgaggatgagggcccaggccgcagctccagccccctccgcctggtgcccttctccagccccaggccccccggagagccgccgggtggggagcccctgatggagaactgcgagaagagcagcgacacttgcaaccccctgtcaggcgccttctcaggagtgtccaacattttcagcttctggggggacagtcggggccgccagtaccaggagctccctcgatgccccgcccccacccccagcctcctcaacatccccctctccagcccgggtcggcggccccggggcgacgtggagagcaggctggatgccctccagcgccagctcaacaggctggagacccggctgagtgcagacatggccactgtcctgcagctgctacagaggcagatgacgctggtcccgcccgcctacagtgctgtgaccaccccggggcctggccccacttccacatccccgctgttgcccgtcagccccctccccaccctcaccttggactcgctttctcaggtttcccagttcatggcgtgtgaggagctgcccccgggggccccagagcttccccaagaaggccccacacgacgcctctccctaccgggccagctgggggccctcacctcccagcccctgcacagacacggctcggacccgggcagttagtggggctgcccagtgtggacacgtggctcacccagggatcaaggcgctgctgggccgctccccttggaggccctgctcaggaggccctgaccgtggaaggggagaggaactcgaaagcacagctcctcccccagcccttgggaccatcttctcctgcagtcccctgggccccagtgagaggggcaggggcagggccggcagtaggtggggcctgtggtccccccactgccctgagggcattagctggtctaactgcccggaggcacccggccctgggccttaggcacctcaaggacttttctgctatttactgctcttattgttaaggataataattaaggatcatatgaataattaatgaagatgctgatgactatgaataataaataattatcctgaggaga

SEQ ID NO: 709 - DNA, 3884 bp, Homo sapiens
  source 1..3884: mol_type = genomic DNA
  misc_feature 1..3884: note = cDNA of KCNH2 gene SNP c.2930G>T (p.Cys977Phe)
atgccggtgcggaggggccacgtcgcgccgcagaacaccttcctggacaccatcatccgcaagtttgagggccagagccgtaagttcatcatcgccaacgctcgggtggagaactgcgccgtcatctactgcaacgacggcttctgcgagctgtgcggctactcgcgggccgaggtgatgcagcgaccctgcacctgcgacttcctgcacgggccgcgcacgcagcgccgcgctgccgcgcagatcgcgcaggcactgctgggcgccgaggagcgcaaagtggaaatcgccttctaccggaaagatgggagctgcttcctatgtctggtggatgtggtgcccgtgaagaacgaggatggggctgtcatcatgttcatcctcaatttcgaggtggtgatggagaaggacatggtggggtccccggctcatgacaccaaccaccggggcccccccaccagctggctggccccaggccgcgccaagaccttccgcctgaagctgcccgcgctgctggcgctgacggcccgggagtcgtcggtgcggtcgggcggcgcgggcggcgcgggcgccccgggggccgtggtggtggacgtggacctgacgcccgcggcacccagcagcgagtcgctggccctggacgaagtgacagccatggacaaccacgtggcagggctcgggcccgcggaggagcggcgtgcgctggtgggtcccggctctccgccccgcagcgcgcccggccagctcccatcgccccgggcgcacagcctcaaccccgacgcctcgggctccagctgcagcctggcccggacgcgctcccgagaaagctgcgccagcgtgcgccgcgcctcgtcggccgacgacatcgaggccatgcgcgccggggtgctgcccccgccaccgcgccacgccagcaccggggccatgcacccactgcgcagcggcttgctcaactccacctcggactccgacctcgtgcgctaccgcaccattagcaagattccccaaatcaccctcaactttgtggacctcaagggcgaccccttcttggcttcgcccaccagtgaccgtgagatcatagcacctaagataaaggagcgaacccacaatgtcactgagaaggtcacccaggtcctgtccctgggcgccgacgtgctgcctgagtacaagctgcaggcaccgcgcatccaccgctggaccatcctgcattacagccccttcaaggccgtgtgggactggctcatcctgctgctggtcatctacacggctgtcttcacaccctactcggctgccttcctgctgaaggagacggaagaaggcccgcctgctaccgagtgtggctacgcctgccagccgctggctgtggtggacctcatcgtggacatcatgttcattgtggacatcctcatcaacttccgcaccacctacgtcaatgccaacgaggaggtggtcagccaccccggccgcatcgccgtccactacttcaagggctggttcctcatcgacatggtggccgccatccccttcgacctgctcatcttcggctctggctctgaggagctgatcgggctgctgaagactgcgcggctgctgcggctggtgcgcgtggcgcggaagctggatcgctactcagagtacggcgcggccgtgctgttcttgctcatgtgcacctttgcgctcatcgcgcactggctagcctgcatctggtacgccatcggcaacatggagcagccacacatggactcacgcatcggctggctgcacaacctgggcgaccagataggcaaaccctacaacagcagcggcctgggcggcccctccatcaaggacaagtatgtgacggcgctctacttcaccttcagcagcctcaccagtgtgggcttcggcaacgtctctcccaacaccaactcagagaagatcttctccatctgcgtcatgctcattggctccctcatgtatgctagcatcttcggcaacgtgtcggccatcatccagcggctgtactcgggcacagcccgctaccacacacagatgctgcgggtgcgggagttcatccgcttccaccagatccccaatcccctgcgccagcgcctcgaggagtacttccagcacgcctggtcctacaccaacggcatcgacatgaacgcggtgctgaagggcttccctgagtgcctgcaggctgacatctgcctgcacctgaaccgctcactgctgcagcactgcaaacccttccgaggggccaccaagggctgccttcgggccctggccatgaagttcaagaccacacatgcaccgccaggggacacactggtgcatgctggggacctgctcaccgccctgtacttcatctcccggggctccatcgagatcctgcggggcgacgtcgtcgtggccatcctggggaagaatgacatctttggggagcctctgaacctgtatgcaaggcctggcaagtcgaacggggatgtgcgggccctcacctactgtgacctacacaagatccatcgggacgacctgctggaggtgctggacatgtaccctgagttctccgaccacttctggtccagcctggagatcaccttcaacctgcgagataccaacatgatcccgggctcccccggcagtacggagttagagggtggcttcagtcggcaacgcaagcgcaagttgtccttccgcaggcgcacggacaaggacacggagcagccaggggaggtgtcggccttggggccgggccgggcgggggcagggccgagtagccggggccggccgggggggccgtggggggagagcccgtccagtggcccctccagccctgagagcagtgaggatgagggcccaggccgcagctccagccccctccgcctggtgcccttctccagccccaggccccccggagagccgccgggtggggagcccctgatggaggacttcgagaagagcagcgacacttgcaaccccctgtcaggcgccttctcaggagtgtccaacattttcagcttctggggggacagtcggggccgccagtaccaggagctccctcgatgccccgcccccacccccagcctcctcaacatccccctctccagcccgggtcggcggccccggggcgacgtggagagcaggctggatgccctccagcgccagctcaacaggctggagacccggctgagtgcagacatggccactgtcctgcagctgctacagaggcagatgacgctggtcccgcccgcctacagtgctgtgaccaccccggggcctggccccacttccacatccccgctgttgcccgtcagccccctccccaccctcaccttggactcgctttctcaggtttcccagttcatggcgtgtgaggagctgcccccgggggccccagagcttccccaagaaggccccacacgacgcctctccctaccgggccagctgggggccctcacctcccagcccctgcacagacacggctcggacccgggcagttagtggggctgcccagtgtggacacgtggctcacccagggatcaaggcgctgctgggccgctccccttggaggccctgctcaggaggccctgaccgtggaaggggagaggaactcgaaagcacagctcctcccccagcccttgggaccatcttctcctgcagtcccctgggccccagtgagaggggcaggggcagggccggcagtaggtggggcctgtggtccccccactgccctgagggcattagctggtctaactgcccggaggcacccggccctgggccttaggcacctcaaggacttttctgctatttactgctcttattgttaaggataataattaaggatcatatgaataattaatgaagatgctgatgactatgaataataaataattatcctgaggaga

SEQ ID NO: 710 - DNA, 3884 bp, Homo sapiens
  source 1..3884: mol_type = genomic DNA
  misc_feature 1..3884: note = cDNA of KCNH2 gene SNP c.2931C>A (p.Cys977Ter)
atgccggtgcggaggggccacgtcgcgccgcagaacaccttcctggacaccatcatccgcaagtttgagggccagagccgtaagttcatcatcgccaacgctcgggtggagaactgcgccgtcatctactgcaacgacggcttctgcgagctgtgcggctactcgcgggccgaggtgatgcagcgaccctgcacctgcgacttcctgcacgggccgcgcacgcagcgccgcgctgccgcgcagatcgcgcaggcactgctgggcgccgaggagcgcaaagtggaaatcgccttctaccggaaagatgggagctgcttcctatgtctggtggatgtggtgcccgtgaagaacgaggatggggctgtcatcatgttcatcctcaatttcgaggtggtgatggagaaggacatggtggggtccccggctcatgacaccaaccaccggggcccccccaccagctggctggccccaggccgcgccaagaccttccgcctgaagctgcccgcgctgctggcgctgacggcccgggagtcgtcggtgcggtcgggcggcgcgggcggcgcgggcgccccgggggccgtggtggtggacgtggacctgacgcccgcggcacccagcagcgagtcgctggccctggacgaagtgacagccatggacaaccacgtggcagggctcgggcccgcggaggagcggcgtgcgctggtgggtcccggctctccgccccgcagcgcgcccggccagctcccatcgccccgggcgcacagcctcaaccccgacgcctcgggctccagctgcagcctggcccggacgcgctcccgagaaagctgcgccagcgtgcgccgcgcctcgtcggccgacgacatcgaggccatgcgcgccggggtgctgcccccgccaccgcgccacgccagcaccggggccatgcacccactgcgcagcggcttgctcaactccacctcggactccgacctcgtgcgctaccgcaccattagcaagattccccaaatcaccctcaactttgtggacctcaagggcgaccccttcttggcttcgcccaccagtgaccgtgagatcatagcacctaagataaaggagcgaacccacaatgtcactgagaaggtcacccaggtcctgtccctgggcgccgacgtgctgcctgagtacaagctgcaggcaccgcgcatccaccgctggaccatcctgcattacagccccttcaaggccgtgtgggactggctcatcctgctgctggtcatctacacggctgtcttcacaccctactcggctgccttcctgctgaaggagacggaagaaggcccgcctgctaccgagtgtggctacgcctgccagccgctggctgtggtggacctcatcgtggacatcatgttcattgtggacatcctcatcaacttccgcaccacctacgtcaatgccaacgaggaggtggtcagccaccccggccgcatcgccgtccactacttcaagggctggttcctcatcgacatggtggccgccatccccttcgacctgctcatcttcggctctggctctgaggagctgatcgggctgctgaagactgcgcggctgctgcggctggtgcgcgtggcgcggaagctggatcgctactcagagtacggcgcggccgtgctgttcttgctcatgtgcacctttgcgctcatcgcgcactggctagcctgcatctggtacgccatcggcaacatggagcagccacacatggactcacgcatcggctggctgcacaacctgggcgaccagataggcaaaccctacaacagcagcggcctgggcggcccctccatcaaggacaagtatgtgacggcgctctacttcaccttcagcagcctcaccagtgtgggcttcggcaacgtctctcccaacaccaactcagagaagatcttctccatctgcgtcatgctcattggctccctcatgtatgctagcatcttcggcaacgtgtcggccatcatccagcggctgtactcgggcacagcccgctaccacacacagatgctgcgggtgcgggagttcatccgcttccaccagatccccaatcccctgcgccagcgcctcgaggagtacttccagcacgcctggtcctacaccaacggcatcgacatgaacgcggtgctgaagggcttccctgagtgcctgcaggctgacatctgcctgcacctgaaccgctcactgctgcagcactgcaaacccttccgaggggccaccaagggctgccttcgggccctggccatgaagttcaagaccacacatgcaccgccaggggacacactggtgcatgctggggacctgctcaccgccctgtacttcatctcccggggctccatcgagatcctgcggggcgacgtcgtcgtggccatcctggggaagaatgacatctttggggagcctctgaacctgtatgcaaggcctggcaagtcgaacggggatgtgcgggccctcacctactgtgacctacacaagatccatcgggacgacctgctggaggtgctggacatgtaccctgagttctccgaccacttctggtccagcctggagatcaccttcaacctgcgagataccaacatgatcccgggctcccccggcagtacggagttagagggtggcttcagtcggcaacgcaagcgcaagttgtccttccgcaggcgcacggacaaggacacggagcagccaggggaggtgtcggccttggggccgggccgggcgggggcagggccgagtagccggggccggccgggggggccgtggggggagagcccgtccagtggcccctccagccctgagagcagtgaggatgagggcccaggccgcagctccagccccctccgcctggtgcccttctccagccccaggccccccggagagccgccgggtggggagcccctgatggaggactgagagaagagcagcgacacttgcaaccccctgtcaggcgccttctcaggagtgtccaacattttcagcttctggggggacagtcggggccgccagtaccaggagctccctcgatgccccgcccccacccccagcctcctcaacatccccctctccagcccgggtcggcggccccggggcgacgtggagagcaggctggatgccctccagcgccagctcaacaggctggagacccggctgagtgcagacatggccactgtcctgcagctgctacagaggcagatgacgctggtcccgcccgcctacagtgctgtgaccaccccggggcctggccccacttccacatccccgctgttgcccgtcagccccctccccaccctcaccttggactcgctttctcaggtttcccagttcatggcgtgtgaggagctgcccccgggggccccagagcttccccaagaaggccccacacgacgcctctccctaccgggccagctgggggccctcacctcccagcccctgcacagacacggctcggacccgggcagttagtggggctgcccagtgtggacacgtggctcacccagggatcaaggcgctgctgggccgctccccttggaggccctgctcaggaggccctgaccgtggaaggggagaggaactcgaaagcacagctcctcccccagcccttgggaccatcttctcctgcagtcccctgggccccagtgagaggggcaggggcagggccggcagtaggtggggcctgtggtccccccactgccctgagggcattagctggtctaactgcccggaggcacccggccctgggccttaggcacctcaaggacttttctgctatttactgctcttattgttaaggataataattaaggatcatatgaataattaatgaagatgctgatgactatgaataataaataattatcctgaggaga

SEQ ID NO: 711 - DNA, 3884 bp, Homo sapiens
  source 1..3884: mol_type = genomic DNA
  misc_feature 1..3884: note = cDNA of KCNH2 gene SNP c.2931C>G (p.Cys977Trp)
atgccggtgcggaggggccacgtcgcgccgcagaacaccttcctggacaccatcatccgcaagtttgagggccagagccgtaagttcatcatcgccaacgctcgggtggagaactgcgccgtcatctactgcaacgacggcttctgcgagctgtgcggctactcgcgggccgaggtgatgcagcgaccctgcacctgcgacttcctgcacgggccgcgcacgcagcgccgcgctgccgcgcagatcgcgcaggcactgctgggcgccgaggagcgcaaagtggaaatcgccttctaccggaaagatgggagctgcttcctatgtctggtggatgtggtgcccgtgaagaacgaggatggggctgtcatcatgttcatcctcaatttcgaggtggtgatggagaaggacatggtggggtccccggctcatgacaccaaccaccggggcccccccaccagctggctggccccaggccgcgccaagaccttccgcctgaagctgcccgcgctgctggcgctgacggcccgggagtcgtcggtgcggtcgggcggcgcgggcggcgcgggcgccccgggggccgtggtggtggacgtggacctgacgcccgcggcacccagcagcgagtcgctggccctggacgaagtgacagccatggacaaccacgtggcagggctcgggcccgcggaggagcggcgtgcgctggtgggtcccggctctccgccccgcagcgcgcccggccagctcccatcgccccgggcgcacagcctcaaccccgacgcctcgggctccagctgcagcctggcccggacgcgctcccgagaaagctgcgccagcgtgcgccgcgcctcgtcggccgacgacatcgaggccatgcgcgccggggtgctgcccccgccaccgcgccacgccagcaccggggccatgcacccactgcgcagcggcttgctcaactccacctcggactccgacctcgtgcgctaccgcaccattagcaagattccccaaatcaccctcaactttgtggacctcaagggcgaccccttcttggcttcgcccaccagtgaccgtgagatcatagcacctaagataaaggagcgaacccacaatgtcactgagaaggtcacccaggtcctgtccctgggcgccgacgtgctgcctgagtacaagctgcaggcaccgcgcatccaccgctggaccatcctgcattacagccccttcaaggccgtgtgggactggctcatcctgctgctggtcatctacacggctgtcttcacaccctactcggctgccttcctgctgaaggagacggaagaaggcccgcctgctaccgagtgtggctacgcctgccagccgctggctgtggtggacctcatcgtggacatcatgttcattgtggacatcctcatcaacttccgcaccacctacgtcaatgccaacgaggaggtggtcagccaccccggccgcatcgccgtccactacttcaagggctggttcctcatcgacatggtggccgccatccccttcgacctgctcatcttcggctctggctctgaggagctgatcgggctgctgaagactgcgcggctgctgcggctggtgcgcgtggcgcggaagctggatcgctactcagagtacggcgcggccgtgctgttcttgctcatgtgcacctttgcgctcatcgcgcactggctagcctgcatctggtacgccatcggcaacatggagcagccacacatggactcacgcatcggctggctgcacaacctgggcgaccagataggcaaaccctacaacagcagcggcctgggcggcccctccatcaaggacaagtatgtgacggcgctctacttcaccttcagcagcctcaccagtgtgggcttcggcaacgtctctcccaacaccaactcagagaagatcttctccatctgcgtcatgctcattggctccctcatgtatgctagcatcttcggcaacgtgtcggccatcatccagcggctgtactcgggcacagcccgctaccacacacagatgctgcgggtgcgggagttcatccgcttccaccagatccccaatcccctgcgccagcgcctcgaggagtacttccagcacgcctggtcctacaccaacggcatcgacatgaacgcggtgctgaagggcttccctgagtgcctgcaggctgacatctgcctgcacctgaaccgctcactgctgcagcactgcaaacccttccgaggggccaccaagggctgccttcgggccctggccatgaagttcaagaccacacatgcaccgccaggggacacactggtgcatgctggggacctgctcaccgccctgtacttcatctcccggggctccatcgagatcctgcggggcgacgtcgtcgtggccatcctggggaagaatgacatctttggggagcctctgaacctgtatgcaaggcctggcaagtcgaacggggatgtgcgggccctcacctactgtgacctacacaagatccatcgggacgacctgctggaggtgctggacatgtaccctgagttctccgaccacttctggtccagcctggagatcaccttcaacctgcgagataccaacatgatcccgggctcccccggcagtacggagttagagggtggcttcagtcggcaacgcaagcgcaagttgtccttccgcaggcgcacggacaaggacacggagcagccaggggaggtgtcggccttggggccgggccgggcgggggcagggccgagtagccggggccggccgggggggccgtggggggagagcccgtccagtggcccctccagccctgagagcagtgaggatgagggcccaggccgcagctccagccccctccgcctggtgcccttctccagccccaggccccccggagagccgccgggtggggagcccctgatggaggactgggagaagagcagcgacacttgcaaccccctgtcaggcgccttctcaggagtgtccaacattttcagcttctggggggacagtcggggccgccagtaccaggagctccctcgatgccccgcccccacccccagcctcctcaacatccccctctccagcccgggtcggcggccccggggcgacgtggagagcaggctggatgccctccagcgccagctcaacaggctggagacccggctgagtgcagacatggccactgtcctgcagctgctacagaggcagatgacgctggtcccgcccgcctacagtgctgtgaccaccccggggcctggccccacttccacatccccgctgttgcccgtcagccccctccccaccctcaccttggactcgctttctcaggtttcccagttcatggcgtgtgaggagctgcccccgggggccccagagcttccccaagaaggccccacacgacgcctctccctaccgggccagctgggggccctcacctcccagcccctgcacagacacggctcggacccgggcagttagtggggctgcccagtgtggacacgtggctcacccagggatcaaggcgctgctgggccgctccccttggaggccctgctcaggaggccctgaccgtggaaggggagaggaactcgaaagcacagctcctcccccagcccttgggaccatcttctcctgcagtcccctgggccccagtgagaggggcaggggcagggccggcagtaggtggggcctgtggtccccccactgccctgagggcattagctggtctaactgcccggaggcacccggccctgggccttaggcacctcaaggacttttctgctatttactgctcttattgttaaggataataattaaggatcatatgaataattaatgaagatgctgatgactatgaataataaataattatcctgaggaga

SEQ ID NO: 712 - DNA, 3884 bp, Homo sapiens
  source 1..3884: mol_type = genomic DNA
  misc_feature 1..3884: note = cDNA of KCNH2 gene SNP c.2932G>A (p.Glu978Lys)
atgccggtgcggaggggccacgtcgcgccgcagaacaccttcctggacaccatcatccgcaagtttgagggccagagccgtaagttcatcatcgccaacgctcgggtggagaactgcgccgtcatctactgcaacgacggcttctgcgagctgtgcggctactcgcgggccgaggtgatgcagcgaccctgcacctgcgacttcctgcacgggccgcgcacgcagcgccgcgctgccgcgcagatcgcgcaggcactgctgggcgccgaggagcgcaaagtggaaatcgccttctaccggaaagatgggagctgcttcctatgtctggtggatgtggtgcccgtgaagaacgaggatggggctgtcatcatgttcatcctcaatttcgaggtggtgatggagaaggacatggtggggtccccggctcatgacaccaaccaccggggcccccccaccagctggctggccccaggccgcgccaagaccttccgcctgaagctgcccgcgctgctggcgctgacggcccgggagtcgtcggtgcggtcgggcggcgcgggcggcgcgggcgccccgggggccgtggtggtggacgtggacctgacgcccgcggcacccagcagcgagtcgctggccctggacgaagtgacagccatggacaaccacgtggcagggctcgggcccgcggaggagcggcgtgcgctggtgggtcccggctctccgccccgcagcgcgcccggccagctcccatcgccccgggcgcacagcctcaaccccgacgcctcgggctccagctgcagcctggcccggacgcgctcccgagaaagctgcgccagcgtgcgccgcgcctcgtcggccgacgacatcgaggccatgcgcgccggggtgctgcccccgccaccgcgccacgccagcaccggggccatgcacccactgcgcagcggcttgctcaactccacctcggactccgacctcgtgcgctaccgcaccattagcaagattccccaaatcaccctcaactttgtggacctcaagggcgaccccttcttggcttcgcccaccagtgaccgtgagatcatagcacctaagataaaggagcgaacccacaatgtcactgagaaggtcacccaggtcctgtccctgggcgccgacgtgctgcctgagtacaagctgcaggcaccgcgcatccaccgctggaccatcctgcattacagccccttcaaggccgtgtgggactggctcatcctgctgctggtcatctacacggctgtcttcacaccctactcggctgccttcctgctgaaggagacggaagaaggcccgcctgctaccgagtgtggctacgcctgccagccgctggctgtggtggacctcatcgtggacatcatgttcattgtggacatcctcatcaacttccgcaccacctacgtcaatgccaacgaggaggtggtcagccaccccggccgcatcgccgtccactacttcaagggctggttcctcatcgacatggtggccgccatccccttcgacctgctcatcttcggctctggctctgaggagctgatcgggctgctgaagactgcgcggctgctgcggctggtgcgcgtggcgcggaagctggatcgctactcagagtacggcgcggccgtgctgttcttgctcatgtgcacctttgcgctcatcgcgcactggctagcctgcatctggtacgccatcggcaacatggagcagccacacatggactcacgcatcggctggctgcacaacctgggcgaccagataggcaaaccctacaacagcagcggcctgggcggcccctccatcaaggacaagtatgtgacggcgctctacttcaccttcagcagcctcaccagtgtgggcttcggcaacgtctctcccaacaccaactcagagaagatcttctccatctgcgtcatgctcattggctccctcatgtatgctagcatcttcggcaacgtgtcggccatcatccagcggctgtactcgggcacagcccgctaccacacacagatgctgcgggtgcgggagttcatccgcttccaccagatccccaatcccctgcgccagcgcctcgaggagtacttccagcacgcctggtcctacaccaacggcatcgacatgaacgcggtgctgaagggcttccctgagtgcctgcaggctgacatctgcctgcacctgaaccgctcactgctgcagcactgcaaacccttccgaggggccaccaagggctgccttcgggccctggccatgaagttcaagaccacacatgcaccgccaggggacacactggtgcatgctggggacctgctcaccgccctgtacttcatctcccggggctccatcgagatcctgcggggcgacgtcgtcgtggccatcctggggaagaatgacatctttggggagcctctgaacctgtatgcaaggcctggcaagtcgaacggggatgtgcgggccctcacctactgtgacctacacaagatccatcgggacgacctgctggaggtgctggacatgtaccctgagttctccgaccacttctggtccagcctggagatcaccttcaacctgcgagataccaacatgatcccgggctcccccggcagtacggagttagagggtggcttcagtcggcaacgcaagcgcaagttgtccttccgcaggcgcacggacaaggacacggagcagccaggggaggtgtcggccttggggccgggccgggcgggggcagggccgagtagccggggccggccgggggggccgtggggggagagcccgtccagtggcccctccagccctgagagcagtgaggatgagggcccaggccgcagctccagccccctccgcctggtgcccttctccagccccaggccccccggagagccgccgggtggggagcccctgatggaggactgcaagaagagcagcgacacttgcaaccccctgtcaggcgccttctcaggagtgtccaacattttcagcttctggggggacagtcggggccgccagtaccaggagctccctcgatgccccgcccccacccccagcctcctcaacatccccctctccagcccgggtcggcggccccggggcgacgtggagagcaggctggatgccctccagcgccagctcaacaggctggagacccggctgagtgcagacatggccactgtcctgcagctgctacagaggcagatgacgctggtcccgcccgcctacagtgctgtgaccaccccggggcctggccccacttccacatccccgctgttgcccgtcagccccctccccaccctcaccttggactcgctttctcaggtttcccagttcatggcgtgtgaggagctgcccccgggggccccagagcttccccaagaaggccccacacgacgcctctccctaccgggccagctgggggccctcacctcccagcccctgcacagacacggctcggacccgggcagttagtggggctgcccagtgtggacacgtggctcacccagggatcaaggcgctgctgggccgctccccttggaggccctgctcaggaggccctgaccgtggaaggggagaggaactcgaaagcacagctcctcccccagcccttgggaccatcttctcctgcagtcccctgggccccagtgagaggggcaggggcagggccggcagtaggtggggcctgtggtccccccactgccctgagggcattagctggtctaactgcccggaggcacccggccctgggccttaggcacctcaaggacttttctgctatttactgctcttattgttaaggataataattaaggatcatatgaataattaatgaagatgctgatgactatgaataataaataattatcctgaggaga

SEQ ID NO: 713 - DNA, 3884 bp, Homo sapiens
  source 1..3884: mol_type = genomic DNA
  misc_feature 1..3884: note = cDNA of KCNH2 gene SNP c.2932G>C (p.Glu978Gln)
atgccggtgcggaggggccacgtcgcgccgcagaacaccttcctggacaccatcatccgcaagtttgagggccagagccgtaagttcatcatcgccaacgctcgggtggagaactgcgccgtcatctactgcaacgacggcttctgcgagctgtgcggctactcgcgggccgaggtgatgcagcgaccctgcacctgcgacttcctgcacgggccgcgcacgcagcgccgcgctgccgcgcagatcgcgcaggcactgctgggcgccgaggagcgcaaagtggaaatcgccttctaccggaaagatgggagctgcttcctatgtctggtggatgtggtgcccgtgaagaacgaggatggggctgtcatcatgttcatcctcaatttcgaggtggtgatggagaaggacatggtggggtccccggctcatgacaccaaccaccggggcccccccaccagctggctggccccaggccgcgccaagaccttccgcctgaagctgcccgcgctgctggcgctgacggcccgggagtcgtcggtgcggtcgggcggcgcgggcggcgcgggcgccccgggggccgtggtggtggacgtggacctgacgcccgcggcacccagcagcgagtcgctggccctggacgaagtgacagccatggacaaccacgtggcagggctcgggcccgcggaggagcggcgtgcgctggtgggtcccggctctccgccccgcagcgcgcccggccagctcccatcgccccgggcgcacagcctcaaccccgacgcctcgggctccagctgcagcctggcccggacgcgctcccgagaaagctgcgccagcgtgcgccgcgcctcgtcggccgacgacatcgaggccatgcgcgccggggtgctgcccccgccaccgcgccacgccagcaccggggccatgcacccactgcgcagcggcttgctcaactccacctcggactccgacctcgtgcgctaccgcaccattagcaagattccccaaatcaccctcaactttgtggacctcaagggcgaccccttcttggcttcgcccaccagtgaccgtgagatcatagcacctaagataaaggagcgaacccacaatgtcactgagaaggtcacccaggtcctgtccctgggcgccgacgtgctgcctgagtacaagctgcaggcaccgcgcatccaccgctggaccatcctgcattacagccccttcaaggccgtgtgggactggctcatcctgctgctggtcatctacacggctgtcttcacaccctactcggctgccttcctgctgaaggagacggaagaaggcccgcctgctaccgagtgtggctacgcctgccagccgctggctgtggtggacctcatcgtggacatcatgttcattgtggacatcctcatcaacttccgcaccacctacgtcaatgccaacgaggaggtggtcagccaccccggccgcatcgccgtccactacttcaagggctggttcctcatcgacatggtggccgccatccccttcgacctgctcatcttcggctctggctctgaggagctgatcgggctgctgaagactgcgcggctgctgcggctggtgcgcgtggcgcggaagctggatcgctactcagagtacggcgcggccgtgctgttcttgctcatgtgcacctttgcgctcatcgcgcactggctagcctgcatctggtacgccatcggcaacatggagcagccacacatggactcacgcatcggctggctgcacaacctgggcgaccagataggcaaaccctacaacagcagcggcctgggcggcccctccatcaaggacaagtatgtgacggcgctctacttcaccttcagcagcctcaccagtgtgggcttcggcaacgtctctcccaacaccaactcagagaagatcttctccatctgcgtcatgctcattggctccctcatgtatgctagcatcttcggcaacgtgtcggccatcatccagcggctgtactcgggcacagcccgctaccacacacagatgctgcgggtgcgggagttcatccgcttccaccagatccccaatcccctgcgccagcgcctcgaggagtacttccagcacgcctggtcctacaccaacggcatcgacatgaacgcggtgctgaagggcttccctgagtgcctgcaggctgacatctgcctgcacctgaaccgctcactgctgcagcactgcaaacccttccgaggggccaccaagggctgccttcgggccctggccatgaagttcaagaccacacatgcaccgccaggggacacactggtgcatgctggggacctgctcaccgccctgtacttcatctcccggggctccatcgagatcctgcggggcgacgtcgtcgtggccatcctggggaagaatgacatctttggggagcctctgaacctgtatgcaaggcctggcaagtcgaacggggatgtgcgggccctcacctactgtgacctacacaagatccatcgggacgacctgctggaggtgctggacatgtaccctgagttctccgaccacttctggtccagcctggagatcaccttcaacctgcgagataccaacatgatcccgggctcccccggcagtacggagttagagggtggcttcagtcggcaacgcaagcgcaagttgtccttccgcaggcgcacggacaaggacacggagcagccaggggaggtgtcggccttggggccgggccgggcgggggcagggccgagtagccggggccggccgggggggccgtggggggagagcccgtccagtggcccctccagccctgagagcagtgaggatgagggcccaggccgcagctccagccccctccgcctggtgcccttctccagccccaggccccccggagagccgccgggtggggagcccctgatggaggactgccagaagagcagcgacacttgcaaccccctgtcaggcgccttctcaggagtgtccaacattttcagcttctggggggacagtcggggccgccagtaccaggagctccctcgatgccccgcccccacccccagcctcctcaacatccccctctccagcccgggtcggcggccccggggcgacgtggagagcaggctggatgccctccagcgccagctcaacaggctggagacccggctgagtgcagacatggccactgtcctgcagctgctacagaggcagatgacgctggtcccgcccgcctacagtgctgtgaccaccccggggcctggccccacttccacatccccgctgttgcccgtcagccccctccccaccctcaccttggactcgctttctcaggtttcccagttcatggcgtgtgaggagctgcccccgggggccccagagcttccccaagaaggccccacacgacgcctctccctaccgggccagctgggggccctcacctcccagcccctgcacagacacggctcggacccgggcagttagtggggctgcccagtgtggacacgtggctcacccagggatcaaggcgctgctgggccgctccccttggaggccctgctcaggaggccctgaccgtggaaggggagaggaactcgaaagcacagctcctcccccagcccttgggaccatcttctcctgcagtcccctgggccccagtgagaggggcaggggcagggccggcagtaggtggggcctgtggtccccccactgccctgagggcattagctggtctaactgcccggaggcacccggccctgggccttaggcacctcaaggacttttctgctatttactgctcttattgttaaggataataattaaggatcatatgaataattaatgaagatgctgatgactatgaataataaataattatcctgaggaga

SEQ ID NO: 714 - DNA, 3884 bp, Homo sapiens
  source 1..3884: mol_type = genomic DNA
  misc_feature 1..3884: note = cDNA of KCNH2 gene SNP c.2932G>T (p.Glu978Ter)
atgccggtgcggaggggccacgtcgcgccgcagaacaccttcctggacaccatcatccgcaagtttgagggccagagccgtaagttcatcatcgccaacgctcgggtggagaactgcgccgtcatctactgcaacgacggcttctgcgagctgtgcggctactcgcgggccgaggtgatgcagcgaccctgcacctgcgacttcctgcacgggccgcgcacgcagcgccgcgctgccgcgcagatcgcgcaggcactgctgggcgccgaggagcgcaaagtggaaatcgccttctaccggaaagatgggagctgcttcctatgtctggtggatgtggtgcccgtgaagaacgaggatggggctgtcatcatgttcatcctcaatttcgaggtggtgatggagaaggacatggtggggtccccggctcatgacaccaaccaccggggcccccccaccagctggctggccccaggccgcgccaagaccttccgcctgaagctgcccgcgctgctggcgctgacggcccgggagtcgtcggtgcggtcgggcggcgcgggcggcgcgggcgccccgggggccgtggtggtggacgtggacctgacgcccgcggcacccagcagcgagtcgctggccctggacgaagtgacagccatggacaaccacgtggcagggctcgggcccgcggaggagcggcgtgcgctggtgggtcccggctctccgccccgcagcgcgcccggccagctcccatcgccccgggcgcacagcctcaaccccgacgcctcgggctccagctgcagcctggcccggacgcgctcccgagaaagctgcgccagcgtgcgccgcgcctcgtcggccgacgacatcgaggccatgcgcgccggggtgctgcccccgccaccgcgccacgccagcaccggggccatgcacccactgcgcagcggcttgctcaactccacctcggactccgacctcgtgcgctaccgcaccattagcaagattccccaaatcaccctcaactttgtggacctcaagggcgaccccttcttggcttcgcccaccagtgaccgtgagatcatagcacctaagataaaggagcgaacccacaatgtcactgagaaggtcacccaggtcctgtccctgggcgccgacgtgctgcctgagtacaagctgcaggcaccgcgcatccaccgctggaccatcctgcattacagccccttcaaggccgtgtgggactggctcatcctgctgctggtcatctacacggctgtcttcacaccctactcggctgccttcctgctgaaggagacggaagaaggcccgcctgctaccgagtgtggctacgcctgccagccgctggctgtggtggacctcatcgtggacatcatgttcattgtggacatcctcatcaacttccgcaccacctacgtcaatgccaacgaggaggtggtcagccaccccggccgcatcgccgtccactacttcaagggctggttcctcatcgacatggtggccgccatccccttcgacctgctcatcttcggctctggctctgaggagctgatcgggctgctgaagactgcgcggctgctgcggctggtgcgcgtggcgcggaagctggatcgctactcagagtacggcgcggccgtgctgttcttgctcatgtgcacctttgcgctcatcgcgcactggctagcctgcatctggtacgccatcggcaacatggagcagccacacatggactcacgcatcggctggctgcacaacctgggcgaccagataggcaaaccctacaacagcagcggcctgggcggcccctccatcaaggacaagtatgtgacggcgctctacttcaccttcagcagcctcaccagtgtgggcttcggcaacgtctctcccaacaccaactcagagaagatcttctccatctgcgtcatgctcattggctccctcatgtatgctagcatcttcggcaacgtgtcggccatcatccagcggctgtactcgggcacagcccgctaccacacacagatgctgcgggtgcgggagttcatccgcttccaccagatccccaatcccctgcgccagcgcctcgaggagtacttccagcacgcctggtcctacaccaacggcatcgacatgaacgcggtgctgaagggcttccctgagtgcctgcaggctgacatctgcctgcacctgaaccgctcactgctgcagcactgcaaacccttccgaggggccaccaagggctgccttcgggccctggccatgaagttcaagaccacacatgcaccgccaggggacacactggtgcatgctggggacctgctcaccgccctgtacttcatctcccggggctccatcgagatcctgcggggcgacgtcgtcgtggccatcctggggaagaatgacatctttggggagcctctgaacctgtatgcaaggcctggcaagtcgaacggggatgtgcgggccctcacctactgtgacctacacaagatccatcgggacgacctgctggaggtgctggacatgtaccctgagttctccgaccacttctggtccagcctggagatcaccttcaacctgcgagataccaacatgatcccgggctcccccggcagtacggagttagagggtggcttcagtcggcaacgcaagcgcaagttgtccttccgcaggcgcacggacaaggacacggagcagccaggggaggtgtcggccttggggccgggccgggcgggggcagggccgagtagccggggccggccgggggggccgtggggggagagcccgtccagtggcccctccagccctgagagcagtgaggatgagggcccaggccgcagctccagccccctccgcctggtgcccttctccagccccaggccccccggagagccgccgggtggggagcccctgatggaggactgctagaagagcagcgacacttgcaaccccctgtcaggcgccttctcaggagtgtccaacattttcagcttctggggggacagtcggggccgccagtaccaggagctccctcgatgccccgcccccacccccagcctcctcaacatccccctctccagcccgggtcggcggccccggggcgacgtggagagcaggctggatgccctccagcgccagctcaacaggctggagacccggctgagtgcagacatggccactgtcctgcagctgctacagaggcagatgacgctggtcccgcccgcctacagtgctgtgaccaccccggggcctggccccacttccacatccccgctgttgcccgtcagccccctccccaccctcaccttggactcgctttctcaggtttcccagttcatggcgtgtgaggagctgcccccgggggccccagagcttccccaagaaggccccacacgacgcctctccctaccgggccagctgggggccctcacctcccagcccctgcacagacacggctcggacccgggcagttagtggggctgcccagtgtggacacgtggctcacccagggatcaaggcgctgctgggccgctccccttggaggccctgctcaggaggccctgaccgtggaaggggagaggaactcgaaagcacagctcctcccccagcccttgggaccatcttctcctgcagtcccctgggccccagtgagaggggcaggggcagggccggcagtaggtggggcctgtggtccccccactgccctgagggcattagctggtctaactgcccggaggcacccggccctgggccttaggcacctcaaggacttttctgctatttactgctcttattgttaaggataataattaaggatcatatgaataattaatgaagatgctgatgactatgaataataaataattatcctgaggaga

SEQ ID NO: 715 - DNA, 3884 bp, Homo sapiens
  source 1..3884: mol_type = genomic DNA
  misc_feature 1..3884: note = cDNA of KCNH2 gene SNP c.293T>G (p.Phe98Cys)
atgccggtgcggaggggccacgtcgcgccgcagaacaccttcctggacaccatcatccgcaagtttgagggccagagccgtaagttcatcatcgccaacgctcgggtggagaactgcgccgtcatctactgcaacgacggcttctgcgagctgtgcggctactcgcgggccgaggtgatgcagcgaccctgcacctgcgacttcctgcacgggccgcgcacgcagcgccgcgctgccgcgcagatcgcgcaggcactgctgggcgccgaggagcgcaaagtggaaatcgcctgctaccggaaagatgggagctgcttcctatgtctggtggatgtggtgcccgtgaagaacgaggatggggctgtcatcatgttcatcctcaatttcgaggtggtgatggagaaggacatggtggggtccccggctcatgacaccaaccaccggggcccccccaccagctggctggccccaggccgcgccaagaccttccgcctgaagctgcccgcgctgctggcgctgacggcccgggagtcgtcggtgcggtcgggcggcgcgggcggcgcgggcgccccgggggccgtggtggtggacgtggacctgacgcccgcggcacccagcagcgagtcgctggccctggacgaagtgacagccatggacaaccacgtggcagggctcgggcccgcggaggagcggcgtgcgctggtgggtcccggctctccgccccgcagcgcgcccggccagctcccatcgccccgggcgcacagcctcaaccccgacgcctcgggctccagctgcagcctggcccggacgcgctcccgagaaagctgcgccagcgtgcgccgcgcctcgtcggccgacgacatcgaggccatgcgcgccggggtgctgcccccgccaccgcgccacgccagcaccggggccatgcacccactgcgcagcggcttgctcaactccacctcggactccgacctcgtgcgctaccgcaccattagcaagattccccaaatcaccctcaactttgtggacctcaagggcgaccccttcttggcttcgcccaccagtgaccgtgagatcatagcacctaagataaaggagcgaacccacaatgtcactgagaaggtcacccaggtcctgtccctgggcgccgacgtgctgcctgagtacaagctgcaggcaccgcgcatccaccgctggaccatcctgcattacagccccttcaaggccgtgtgggactggctcatcctgctgctggtcatctacacggctgtcttcacaccctactcggctgccttcctgctgaaggagacggaagaaggcccgcctgctaccgagtgtggctacgcctgccagccgctggctgtggtggacctcatcgtggacatcatgttcattgtggacatcctcatcaacttccgcaccacctacgtcaatgccaacgaggaggtggtcagccaccccggccgcatcgccgtccactacttcaagggctggttcctcatcgacatggtggccgccatccccttcgacctgctcatcttcggctctggctctgaggagctgatcgggctgctgaagactgcgcggctgctgcggctggtgcgcgtggcgcggaagctggatcgctactcagagtacggcgcggccgtgctgttcttgctcatgtgcacctttgcgctcatcgcgcactggctagcctgcatctggtacgccatcggcaacatggagcagccacacatggactcacgcatcggctggctgcacaacctgggcgaccagataggcaaaccctacaacagcagcggcctgggcggcccctccatcaaggacaagtatgtgacggcgctctacttcaccttcagcagcctcaccagtgtgggcttcggcaacgtctctcccaacaccaactcagagaagatcttctccatctgcgtcatgctcattggctccctcatgtatgctagcatcttcggcaacgtgtcggccatcatccagcggctgtactcgggcacagcccgctaccacacacagatgctgcgggtgcgggagttcatccgcttccaccagatccccaatcccctgcgccagcgcctcgaggagtacttccagcacgcctggtcctacaccaacggcatcgacatgaacgcggtgctgaagggcttccctgagtgcctgcaggctgacatctgcctgcacctgaaccgctcactgctgcagcactgcaaacccttccgaggggccaccaagggctgccttcgggccctggccatgaagttcaagaccacacatgcaccgccaggggacacactggtgcatgctggggacctgctcaccgccctgtacttcatctcccggggctccatcgagatcctgcggggcgacgtcgtcgtggccatcctggggaagaatgacatctttggggagcctctgaacctgtatgcaaggcctggcaagtcgaacggggatgtgcgggccctcacctactgtgacctacacaagatccatcgggacgacctgctggaggtgctggacatgtaccctgagttctccgaccacttctggtccagcctggagatcaccttcaacctgcgagataccaacatgatcccgggctcccccggcagtacggagttagagggtggcttcagtcggcaacgcaagcgcaagttgtccttccgcaggcgcacggacaaggacacggagcagccaggggaggtgtcggccttggggccgggccgggcgggggcagggccgagtagccggggccggccgggggggccgtggggggagagcccgtccagtggcccctccagccctgagagcagtgaggatgagggcccaggccgcagctccagccccctccgcctggtgcccttctccagccccaggccccccggagagccgccgggtggggagcccctgatggaggactgcgagaagagcagcgacacttgcaaccccctgtcaggcgccttctcaggagtgtccaacattttcagcttctggggggacagtcggggccgccagtaccaggagctccctcgatgccccgcccccacccccagcctcctcaacatccccctctccagcccgggtcggcggccccggggcgacgtggagagcaggctggatgccctccagcgccagctcaacaggctggagacccggctgagtgcagacatggccactgtcctgcagctgctacagaggcagatgacgctggtcccgcccgcctacagtgctgtgaccaccccggggcctggccccacttccacatccccgctgttgcccgtcagccccctccccaccctcaccttggactcgctttctcaggtttcccagttcatggcgtgtgaggagctgcccccgggggccccagagcttccccaagaaggccccacacgacgcctctccctaccgggccagctgggggccctcacctcccagcccctgcacagacacggctcggacccgggcagttagtggggctgcccagtgtggacacgtggctcacccagggatcaaggcgctgctgggccgctccccttggaggccctgctcaggaggccctgaccgtggaaggggagaggaactcgaaagcacagctcctcccccagcccttgggaccatcttctcctgcagtcccctgggccccagtgagaggggcaggggcagggccggcagtaggtggggcctgtggtccccccactgccctgagggcattagctggtctaactgcccggaggcacccggccctgggccttaggcacctcaaggacttttctgctatttactgctcttattgttaaggataataattaaggatcatatgaataattaatgaagatgctgatgactatgaataataaataattatcctgaggaga

SEQ ID NO: 716 - DNA, 3884 bp, Homo sapiens
  source 1..3884: mol_type = genomic DNA
  misc_feature 1..3884: note = cDNA of KCNH2 gene SNP c.2941A>G (p.Ser981Gly)
atgccggtgcggaggggccacgtcgcgccgcagaacaccttcctggacaccatcatccgcaagtttgagggccagagccgtaagttcatcatcgccaacgctcgggtggagaactgcgccgtcatctactgcaacgacggcttctgcgagctgtgcggctactcgcgggccgaggtgatgcagcgaccctgcacctgcgacttcctgcacgggccgcgcacgcagcgccgcgctgccgcgcagatcgcgcaggcactgctgggcgccgaggagcgcaaagtggaaatcgccttctaccggaaagatgggagctgcttcctatgtctggtggatgtggtgcccgtgaagaacgaggatggggctgtcatcatgttcatcctcaatttcgaggtggtgatggagaaggacatggtggggtccccggctcatgacaccaaccaccggggcccccccaccagctggctggccccaggccgcgccaagaccttccgcctgaagctgcccgcgctgctggcgctgacggcccgggagtcgtcggtgcggtcgggcggcgcgggcggcgcgggcgccccgggggccgtggtggtggacgtggacctgacgcccgcggcacccagcagcgagtcgctggccctggacgaagtgacagccatggacaaccacgtggcagggctcgggcccgcggaggagcggcgtgcgctggtgggtcccggctctccgccccgcagcgcgcccggccagctcccatcgccccgggcgcacagcctcaaccccgacgcctcgggctccagctgcagcctggcccggacgcgctcccgagaaagctgcgccagcgtgcgccgcgcctcgtcggccgacgacatcgaggccatgcgcgccggggtgctgcccccgccaccgcgccacgccagcaccggggccatgcacccactgcgcagcggcttgctcaactccacctcggactccgacctcgtgcgctaccgcaccattagcaagattccccaaatcaccctcaactttgtggacctcaagggcgaccccttcttggcttcgcccaccagtgaccgtgagatcatagcacctaagataaaggagcgaacccacaatgtcactgagaaggtcacccaggtcctgtccctgggcgccgacgtgctgcctgagtacaagctgcaggcaccgcgcatccaccgctggaccatcctgcattacagccccttcaaggccgtgtgggactggctcatcctgctgctggtcatctacacggctgtcttcacaccctactcggctgccttcctgctgaaggagacggaagaaggcccgcctgctaccgagtgtggctacgcctgccagccgctggctgtggtggacctcatcgtggacatcatgttcattgtggacatcctcatcaacttccgcaccacctacgtcaatgccaacgaggaggtggtcagccaccccggccgcatcgccgtccactacttcaagggctggttcctcatcgacatggtggccgccatccccttcgacctgctcatcttcggctctggctctgaggagctgatcgggctgctgaagactgcgcggctgctgcggctggtgcgcgtggcgcggaagctggatcgctactcagagtacggcgcggccgtgctgttcttgctcatgtgcacctttgcgctcatcgcgcactggctagcctgcatctggtacgccatcggcaacatggagcagccacacatggactcacgcatcggctggctgcacaacctgggcgaccagataggcaaaccctacaacagcagcggcctgggcggcccctccatcaaggacaagtatgtgacggcgctctacttcaccttcagcagcctcaccagtgtgggcttcggcaacgtctctcccaacaccaactcagagaagatcttctccatctgcgtcatgctcattggctccctcatgtatgctagcatcttcggcaacgtgtcggccatcatccagcggctgtactcgggcacagcccgctaccacacacagatgctgcgggtgcgggagttcatccgcttccaccagatccccaatcccctgcgccagcgcctcgaggagtacttccagcacgcctggtcctacaccaacggcatcgacatgaacgcggtgctgaagggcttccctgagtgcctgcaggctgacatctgcctgcacctgaaccgctcactgctgcagcactgcaaacccttccgaggggccaccaagggctgccttcgggccctggccatgaagttcaagaccacacatgcaccgccaggggacacactggtgcatgctggggacctgctcaccgccctgtacttcatctcccggggctccatcgagatcctgcggggcgacgtcgtcgtggccatcctggggaagaatgacatctttggggagcctctgaacctgtatgcaaggcctggcaagtcgaacggggatgtgcgggccctcacctactgtgacctacacaagatccatcgggacgacctgctggaggtgctggacatgtaccctgagttctccgaccacttctggtccagcctggagatcaccttcaacctgcgagataccaacatgatcccgggctcccccggcagtacggagttagagggtggcttcagtcggcaacgcaagcgcaagttgtccttccgcaggcgcacggacaaggacacggagcagccaggggaggtgtcggccttggggccgggccgggcgggggcagggccgagtagccggggccggccgggggggccgtggggggagagcccgtccagtggcccctccagccctgagagcagtgaggatgagggcccaggccgcagctccagccccctccgcctggtgcccttctccagccccaggccccccggagagccgccgggtggggagcccctgatggaggactgcgagaagagcggcgacacttgcaaccccctgtcaggcgccttctcaggagtgtccaacattttcagcttctggggggacagtcggggccgccagtaccaggagctccctcgatgccccgcccccacccccagcctcctcaacatccccctctccagcccgggtcggcggccccggggcgacgtggagagcaggctggatgccctccagcgccagctcaacaggctggagacccggctgagtgcagacatggccactgtcctgcagctgctacagaggcagatgacgctggtcccgcccgcctacagtgctgtgaccaccccggggcctggccccacttccacatccccgctgttgcccgtcagccccctccccaccctcaccttggactcgctttctcaggtttcccagttcatggcgtgtgaggagctgcccccgggggccccagagcttccccaagaaggccccacacgacgcctctccctaccgggccagctgggggccctcacctcccagcccctgcacagacacggctcggacccgggcagttagtggggctgcccagtgtggacacgtggctcacccagggatcaaggcgctgctgggccgctccccttggaggccctgctcaggaggccctgaccgtggaaggggagaggaactcgaaagcacagctcctcccccagcccttgggaccatcttctcctgcagtcccctgggccccagtgagaggggcaggggcagggccggcagtaggtggggcctgtggtccccccactgccctgagggcattagctggtctaactgcccggaggcacccggccctgggccttaggcacctcaaggacttttctgctatttactgctcttattgttaaggataataattaaggatcatatgaataattaatgaagatgctgatgactatgaataataaataattatcctgaggaga

SEQ ID NO: 717 - DNA, 3884 bp, Homo sapiens
  source 1..3884: mol_type = genomic DNA
  misc_feature 1..3884: note = cDNA of KCNH2 gene SNP c.2944G>A (p.Asp982Asn)
atgccggtgcggaggggccacgtcgcgccgcagaacaccttcctggacaccatcatccgcaagtttgagggccagagccgtaagttcatcatcgccaacgctcgggtggagaactgcgccgtcatctactgcaacgacggcttctgcgagctgtgcggctactcgcgggccgaggtgatgcagcgaccctgcacctgcgacttcctgcacgggccgcgcacgcagcgccgcgctgccgcgcagatcgcgcaggcactgctgggcgccgaggagcgcaaagtggaaatcgccttctaccggaaagatgggagctgcttcctatgtctggtggatgtggtgcccgtgaagaacgaggatggggctgtcatcatgttcatcctcaatttcgaggtggtgatggagaaggacatggtggggtccccggctcatgacaccaaccaccggggcccccccaccagctggctggccccaggccgcgccaagaccttccgcctgaagctgcccgcgctgctggcgctgacggcccgggagtcgtcggtgcggtcgggcggcgcgggcggcgcgggcgccccgggggccgtggtggtggacgtggacctgacgcccgcggcacccagcagcgagtcgctggccctggacgaagtgacagccatggacaaccacgtggcagggctcgggcccgcggaggagcggcgtgcgctggtgggtcccggctctccgccccgcagcgcgcccggccagctcccatcgccccgggcgcacagcctcaaccccgacgcctcgggctccagctgcagcctggcccggacgcgctcccgagaaagctgcgccagcgtgcgccgcgcctcgtcggccgacgacatcgaggccatgcgcgccggggtgctgcccccgccaccgcgccacgccagcaccggggccatgcacccactgcgcagcggcttgctcaactccacctcggactccgacctcgtgcgctaccgcaccattagcaagattccccaaatcaccctcaactttgtggacctcaagggcgaccccttcttggcttcgcccaccagtgaccgtgagatcatagcacctaagataaaggagcgaacccacaatgtcactgagaaggtcacccaggtcctgtccctgggcgccgacgtgctgcctgagtacaagctgcaggcaccgcgcatccaccgctggaccatcctgcattacagccccttcaaggccgtgtgggactggctcatcctgctgctggtcatctacacggctgtcttcacaccctactcggctgccttcctgctgaaggagacggaagaaggcccgcctgctaccgagtgtggctacgcctgccagccgctggctgtggtggacctcatcgtggacatcatgttcattgtggacatcctcatcaacttccgcaccacctacgtcaatgccaacgaggaggtggtcagccaccccggccgcatcgccgtccactacttcaagggctggttcctcatcgacatggtggccgccatccccttcgacctgctcatcttcggctctggctctgaggagctgatcgggctgctgaagactgcgcggctgctgcggctggtgcgcgtggcgcggaagctggatcgctactcagagtacggcgcggccgtgctgttcttgctcatgtgcacctttgcgctcatcgcgcactggctagcctgcatctggtacgccatcggcaacatggagcagccacacatggactcacgcatcggctggctgcacaacctgggcgaccagataggcaaaccctacaacagcagcggcctgggcggcccctccatcaaggacaagtatgtgacggcgctctacttcaccttcagcagcctcaccagtgtgggcttcggcaacgtctctcccaacaccaactcagagaagatcttctccatctgcgtcatgctcattggctccctcatgtatgctagcatcttcggcaacgtgtcggccatcatccagcggctgtactcgggcacagcccgctaccacacacagatgctgcgggtgcgggagttcatccgcttccaccagatccccaatcccctgcgccagcgcctcgaggagtacttccagcacgcctggtcctacaccaacggcatcgacatgaacgcggtgctgaagggcttccctgagtgcctgcaggctgacatctgcctgcacctgaaccgctcactgctgcagcactgcaaacccttccgaggggccaccaagggctgccttcgggccctggccatgaagttcaagaccacacatgcaccgccaggggacacactggtgcatgctggggacctgctcaccgccctgtacttcatctcccggggctccatcgagatcctgcggggcgacgtcgtcgtggccatcctggggaagaatgacatctttggggagcctctgaacctgtatgcaaggcctggcaagtcgaacggggatgtgcgggccctcacctactgtgacctacacaagatccatcgggacgacctgctggaggtgctggacatgtaccctgagttctccgaccacttctggtccagcctggagatcaccttcaacctgcgagataccaacatgatcccgggctcccccggcagtacggagttagagggtggcttcagtcggcaacgcaagcgcaagttgtccttccgcaggcgcacggacaaggacacggagcagccaggggaggtgtcggccttggggccgggccgggcgggggcagggccgagtagccggggccggccgggggggccgtggggggagagcccgtccagtggcccctccagccctgagagcagtgaggatgagggcccaggccgcagctccagccccctccgcctggtgcccttctccagccccaggccccccggagagccgccgggtggggagcccctgatggaggactgcgagaagagcagcaacacttgcaaccccctgtcaggcgccttctcaggagtgtccaacattttcagcttctggggggacagtcggggccgccagtaccaggagctccctcgatgccccgcccccacccccagcctcctcaacatccccctctccagcccgggtcggcggccccggggcgacgtggagagcaggctggatgccctccagcgccagctcaacaggctggagacccggctgagtgcagacatggccactgtcctgcagctgctacagaggcagatgacgctggtcccgcccgcctacagtgctgtgaccaccccggggcctggccccacttccacatccccgctgttgcccgtcagccccctccccaccctcaccttggactcgctttctcaggtttcccagttcatggcgtgtgaggagctgcccccgggggccccagagcttccccaagaaggccccacacgacgcctctccctaccgggccagctgggggccctcacctcccagcccctgcacagacacggctcggacccgggcagttagtggggctgcccagtgtggacacgtggctcacccagggatcaaggcgctgctgggccgctccccttggaggccctgctcaggaggccctgaccgtggaaggggagaggaactcgaaagcacagctcctcccccagcccttgggaccatcttctcctgcagtcccctgggccccagtgagaggggcaggggcagggccggcagtaggtggggcctgtggtccccccactgccctgagggcattagctggtctaactgcccggaggcacccggccctgggccttaggcacctcaaggacttttctgctatttactgctcttattgttaaggataataattaaggatcatatgaataattaatgaagatgctgatgactatgaataataaataattatcctgaggaga

SEQ ID NO: 718 - DNA, 3884 bp, Homo sapiens
  source 1..3884: mol_type = genomic DNA
  misc_feature 1..3884: note = cDNA of KCNH2 gene SNP c.2948C>T (p.Thr983Ile)
atgccggtgcggaggggccacgtcgcgccgcagaacaccttcctggacaccatcatccgcaagtttgagggccagagccgtaagttcatcatcgccaacgctcgggtggagaactgcgccgtcatctactgcaacgacggcttctgcgagctgtgcggctactcgcgggccgaggtgatgcagcgaccctgcacctgcgacttcctgcacgggccgcgcacgcagcgccgcgctgccgcgcagatcgcgcaggcactgctgggcgccgaggagcgcaaagtggaaatcgccttctaccggaaagatgggagctgcttcctatgtctggtggatgtggtgcccgtgaagaacgaggatggggctgtcatcatgttcatcctcaatttcgaggtggtgatggagaaggacatggtggggtccccggctcatgacaccaaccaccggggcccccccaccagctggctggccccaggccgcgccaagaccttccgcctgaagctgcccgcgctgctggcgctgacggcccgggagtcgtcggtgcggtcgggcggcgcgggcggcgcgggcgccccgggggccgtggtggtggacgtggacctgacgcccgcggcacccagcagcgagtcgctggccctggacgaagtgacagccatggacaaccacgtggcagggctcgggcccgcggaggagcggcgtgcgctggtgggtcccggctctccgccccgcagcgcgcccggccagctcccatcgccccgggcgcacagcctcaaccccgacgcctcgggctccagctgcagcctggcccggacgcgctcccgagaaagctgcgccagcgtgcgccgcgcctcgtcggccgacgacatcgaggccatgcgcgccggggtgctgcccccgccaccgcgccacgccagcaccggggccatgcacccactgcgcagcggcttgctcaactccacctcggactccgacctcgtgcgctaccgcaccattagcaagattccccaaatcaccctcaactttgtggacctcaagggcgaccccttcttggcttcgcccaccagtgaccgtgagatcatagcacctaagataaaggagcgaacccacaatgtcactgagaaggtcacccaggtcctgtccctgggcgccgacgtgctgcctgagtacaagctgcaggcaccgcgcatccaccgctggaccatcctgcattacagccccttcaaggccgtgtgggactggctcatcctgctgctggtcatctacacggctgtcttcacaccctactcggctgccttcctgctgaaggagacggaagaaggcccgcctgctaccgagtgtggctacgcctgccagccgctggctgtggtggacctcatcgtggacatcatgttcattgtggacatcctcatcaacttccgcaccacctacgtcaatgccaacgaggaggtggtcagccaccccggccgcatcgccgtccactacttcaagggctggttcctcatcgacatggtggccgccatccccttcgacctgctcatcttcggctctggctctgaggagctgatcgggctgctgaagactgcgcggctgctgcggctggtgcgcgtggcgcggaagctggatcgctactcagagtacggcgcggccgtgctgttcttgctcatgtgcacctttgcgctcatcgcgcactggctagcctgcatctggtacgccatcggcaacatggagcagccacacatggactcacgcatcggctggctgcacaacctgggcgaccagataggcaaaccctacaacagcagcggcctgggcggcccctccatcaaggacaagtatgtgacggcgctctacttcaccttcagcagcctcaccagtgtgggcttcggcaacgtctctcccaacaccaactcagagaagatcttctccatctgcgtcatgctcattggctccctcatgtatgctagcatcttcggcaacgtgtcggccatcatccagcggctgtactcgggcacagcccgctaccacacacagatgctgcgggtgcgggagttcatccgcttccaccagatccccaatcccctgcgccagcgcctcgaggagtacttccagcacgcctggtcctacaccaacggcatcgacatgaacgcggtgctgaagggcttccctgagtgcctgcaggctgacatctgcctgcacctgaaccgctcactgctgcagcactgcaaacccttccgaggggccaccaagggctgccttcgggccctggccatgaagttcaagaccacacatgcaccgccaggggacacactggtgcatgctggggacctgctcaccgccctgtacttcatctcccggggctccatcgagatcctgcggggcgacgtcgtcgtggccatcctggggaagaatgacatctttggggagcctctgaacctgtatgcaaggcctggcaagtcgaacggggatgtgcgggccctcacctactgtgacctacacaagatccatcgggacgacctgctggaggtgctggacatgtaccctgagttctccgaccacttctggtccagcctggagatcaccttcaacctgcgagataccaacatgatcccgggctcccccggcagtacggagttagagggtggcttcagtcggcaacgcaagcgcaagttgtccttccgcaggcgcacggacaaggacacggagcagccaggggaggtgtcggccttggggccgggccgggcgggggcagggccgagtagccggggccggccgggggggccgtggggggagagcccgtccagtggcccctccagccctgagagcagtgaggatgagggcccaggccgcagctccagccccctccgcctggtgcccttctccagccccaggccccccggagagccgccgggtggggagcccctgatggaggactgcgagaagagcagcgacatttgcaaccccctgtcaggcgccttctcaggagtgtccaacattttcagcttctggggggacagtcggggccgccagtaccaggagctccctcgatgccccgcccccacccccagcctcctcaacatccccctctccagcccgggtcggcggccccggggcgacgtggagagcaggctggatgccctccagcgccagctcaacaggctggagacccggctgagtgcagacatggccactgtcctgcagctgctacagaggcagatgacgctggtcccgcccgcctacagtgctgtgaccaccccggggcctggccccacttccacatccccgctgttgcccgtcagccccctccccaccctcaccttggactcgctttctcaggtttcccagttcatggcgtgtgaggagctgcccccgggggccccagagcttccccaagaaggccccacacgacgcctctccctaccgggccagctgggggccctcacctcccagcccctgcacagacacggctcggacccgggcagttagtggggctgcccagtgtggacacgtggctcacccagggatcaaggcgctgctgggccgctccccttggaggccctgctcaggaggccctgaccgtggaaggggagaggaactcgaaagcacagctcctcccccagcccttgggaccatcttctcctgcagtcccctgggccccagtgagaggggcaggggcagggccggcagtaggtggggcctgtggtccccccactgccctgagggcattagctggtctaactgcccggaggcacccggccctgggccttaggcacctcaaggacttttctgctatttactgctcttattgttaaggataataattaaggatcatatgaataattaatgaagatgctgatgactatgaataataaataattatcctgaggaga

SEQ ID NO: 719 - DNA, 3884 bp, Homo sapiens
  source 1..3884: mol_type = genomic DNA
  misc_feature 1..3884: note = cDNA of KCNH2 gene SNP c.2952C>A (p.Cys984Ter)
atgccggtgcggaggggccacgtcgcgccgcagaacaccttcctggacaccatcatccgcaagtttgagggccagagccgtaagttcatcatcgccaacgctcgggtggagaactgcgccgtcatctactgcaacgacggcttctgcgagctgtgcggctactcgcgggccgaggtgatgcagcgaccctgcacctgcgacttcctgcacgggccgcgcacgcagcgccgcgctgccgcgcagatcgcgcaggcactgctgggcgccgaggagcgcaaagtggaaatcgccttctaccggaaagatgggagctgcttcctatgtctggtggatgtggtgcccgtgaagaacgaggatggggctgtcatcatgttcatcctcaatttcgaggtggtgatggagaaggacatggtggggtccccggctcatgacaccaaccaccggggcccccccaccagctggctggccccaggccgcgccaagaccttccgcctgaagctgcccgcgctgctggcgctgacggcccgggagtcgtcggtgcggtcgggcggcgcgggcggcgcgggcgccccgggggccgtggtggtggacgtggacctgacgcccgcggcacccagcagcgagtcgctggccctggacgaagtgacagccatggacaaccacgtggcagggctcgggcccgcggaggagcggcgtgcgctggtgggtcccggctctccgccccgcagcgcgcccggccagctcccatcgccccgggcgcacagcctcaaccccgacgcctcgggctccagctgcagcctggcccggacgcgctcccgagaaagctgcgccagcgtgcgccgcgcctcgtcggccgacgacatcgaggccatgcgcgccggggtgctgcccccgccaccgcgccacgccagcaccggggccatgcacccactgcgcagcggcttgctcaactccacctcggactccgacctcgtgcgctaccgcaccattagcaagattccccaaatcaccctcaactttgtggacctcaagggcgaccccttcttggcttcgcccaccagtgaccgtgagatcatagcacctaagataaaggagcgaacccacaatgtcactgagaaggtcacccaggtcctgtccctgggcgccgacgtgctgcctgagtacaagctgcaggcaccgcgcatccaccgctggaccatcctgcattacagccccttcaaggccgtgtgggactggctcatcctgctgctggtcatctacacggctgtcttcacaccctactcggctgccttcctgctgaaggagacggaagaaggcccgcctgctaccgagtgtggctacgcctgccagccgctggctgtggtggacctcatcgtggacatcatgttcattgtggacatcctcatcaacttccgcaccacctacgtcaatgccaacgaggaggtggtcagccaccccggccgcatcgccgtccactacttcaagggctggttcctcatcgacatggtggccgccatccccttcgacctgctcatcttcggctctggctctgaggagctgatcgggctgctgaagactgcgcggctgctgcggctggtgcgcgtggcgcggaagctggatcgctactcagagtacggcgcggccgtgctgttcttgctcatgtgcacctttgcgctcatcgcgcactggctagcctgcatctggtacgccatcggcaacatggagcagccacacatggactcacgcatcggctggctgcacaacctgggcgaccagataggcaaaccctacaacagcagcggcctgggcggcccctccatcaaggacaagtatgtgacggcgctctacttcaccttcagcagcctcaccagtgtgggcttcggcaacgtctctcccaacaccaactcagagaagatcttctccatctgcgtcatgctcattggctccctcatgtatgctagcatcttcggcaacgtgtcggccatcatccagcggctgtactcgggcacagcccgctaccacacacagatgctgcgggtgcgggagttcatccgcttccaccagatccccaatcccctgcgccagcgcctcgaggagtacttccagcacgcctggtcctacaccaacggcatcgacatgaacgcggtgctgaagggcttccctgagtgcctgcaggctgacatctgcctgcacctgaaccgctcactgctgcagcactgcaaacccttccgaggggccaccaagggctgccttcgggccctggccatgaagttcaagaccacacatgcaccgccaggggacacactggtgcatgctggggacctgctcaccgccctgtacttcatctcccggggctccatcgagatcctgcggggcgacgtcgtcgtggccatcctggggaagaatgacatctttggggagcctctgaacctgtatgcaaggcctggcaagtcgaacggggatgtgcgggccctcacctactgtgacctacacaagatccatcgggacgacctgctggaggtgctggacatgtaccctgagttctccgaccacttctggtccagcctggagatcaccttcaacctgcgagataccaacatgatcccgggctcccccggcagtacggagttagagggtggcttcagtcggcaacgcaagcgcaagttgtccttccgcaggcgcacggacaaggacacggagcagccaggggaggtgtcggccttggggccgggccgggcgggggcagggccgagtagccggggccggccgggggggccgtggggggagagcccgtccagtggcccctccagccctgagagcagtgaggatgagggcccaggccgcagctccagccccctccgcctggtgcccttctccagccccaggccccccggagagccgccgggtggggagcccctgatggaggactgcgagaagagcagcgacacttgaaaccccctgtcaggcgccttctcaggagtgtccaacattttcagcttctggggggacagtcggggccgccagtaccaggagctccctcgatgccccgcccccacccccagcctcctcaacatccccctctccagcccgggtcggcggccccggggcgacgtggagagcaggctggatgccctccagcgccagctcaacaggctggagacccggctgagtgcagacatggccactgtcctgcagctgctacagaggcagatgacgctggtcccgcccgcctacagtgctgtgaccaccccggggcctggccccacttccacatccccgctgttgcccgtcagccccctccccaccctcaccttggactcgctttctcaggtttcccagttcatggcgtgtgaggagctgcccccgggggccccagagcttccccaagaaggccccacacgacgcctctccctaccgggccagctgggggccctcacctcccagcccctgcacagacacggctcggacccgggcagttagtggggctgcccagtgtggacacgtggctcacccagggatcaaggcgctgctgggccgctccccttggaggccctgctcaggaggccctgaccgtggaaggggagaggaactcgaaagcacagctcctcccccagcccttgggaccatcttctcctgcagtcccctgggccccagtgagaggggcaggggcagggccggcagtaggtggggcctgtggtccccccactgccctgagggcattagctggtctaactgcccggaggcacccggccctgggccttaggcacctcaaggacttttctgctatttactgctcttattgttaaggataataattaaggatcatatgaataattaatgaagatgctgatgactatgaataataaataattatcctgaggaga

SEQ ID NO: 720 - DNA, 3884 bp, Homo sapiens
  source 1..3884: mol_type = genomic DNA
  misc_feature 1..3884: note = cDNA of KCNH2 gene SNP c.2954A>G (p.Asn985Ser)
atgccggtgcggaggggccacgtcgcgccgcagaacaccttcctggacaccatcatccgcaagtttgagggccagagccgtaagttcatcatcgccaacgctcgggtggagaactgcgccgtcatctactgcaacgacggcttctgcgagctgtgcggctactcgcgggccgaggtgatgcagcgaccctgcacctgcgacttcctgcacgggccgcgcacgcagcgccgcgctgccgcgcagatcgcgcaggcactgctgggcgccgaggagcgcaaagtggaaatcgccttctaccggaaagatgggagctgcttcctatgtctggtggatgtggtgcccgtgaagaacgaggatggggctgtcatcatgttcatcctcaatttcgaggtggtgatggagaaggacatggtggggtccccggctcatgacaccaaccaccggggcccccccaccagctggctggccccaggccgcgccaagaccttccgcctgaagctgcccgcgctgctggcgctgacggcccgggagtcgtcggtgcggtcgggcggcgcgggcggcgcgggcgccccgggggccgtggtggtggacgtggacctgacgcccgcggcacccagcagcgagtcgctggccctggacgaagtgacagccatggacaaccacgtggcagggctcgggcccgcggaggagcggcgtgcgctggtgggtcccggctctccgccccgcagcgcgcccggccagctcccatcgccccgggcgcacagcctcaaccccgacgcctcgggctccagctgcagcctggcccggacgcgctcccgagaaagctgcgccagcgtgcgccgcgcctcgtcggccgacgacatcgaggccatgcgcgccggggtgctgcccccgccaccgcgccacgccagcaccggggccatgcacccactgcgcagcggcttgctcaactccacctcggactccgacctcgtgcgctaccgcaccattagcaagattccccaaatcaccctcaactttgtggacctcaagggcgaccccttcttggcttcgcccaccagtgaccgtgagatcatagcacctaagataaaggagcgaacccacaatgtcactgagaaggtcacccaggtcctgtccctgggcgccgacgtgctgcctgagtacaagctgcaggcaccgcgcatccaccgctggaccatcctgcattacagccccttcaaggccgtgtgggactggctcatcctgctgctggtcatctacacggctgtcttcacaccctactcggctgccttcctgctgaaggagacggaagaaggcccgcctgctaccgagtgtggctacgcctgccagccgctggctgtggtggacctcatcgtggacatcatgttcattgtggacatcctcatcaacttccgcaccacctacgtcaatgccaacgaggaggtggtcagccaccccggccgcatcgccgtccactacttcaagggctggttcctcatcgacatggtggccgccatccccttcgacctgctcatcttcggctctggctctgaggagctgatcgggctgctgaagactgcgcggctgctgcggctggtgcgcgtggcgcggaagctggatcgctactcagagtacggcgcggccgtgctgttcttgctcatgtgcacctttgcgctcatcgcgcactggctagcctgcatctggtacgccatcggcaacatggagcagccacacatggactcacgcatcggctggctgcacaacctgggcgaccagataggcaaaccctacaacagcagcggcctgggcggcccctccatcaaggacaagtatgtgacggcgctctacttcaccttcagcagcctcaccagtgtgggcttcggcaacgtctctcccaacaccaactcagagaagatcttctccatctgcgtcatgctcattggctccctcatgtatgctagcatcttcggcaacgtgtcggccatcatccagcggctgtactcgggcacagcccgctaccacacacagatgctgcgggtgcgggagttcatccgcttccaccagatccccaatcccctgcgccagcgcctcgaggagtacttccagcacgcctggtcctacaccaacggcatcgacatgaacgcggtgctgaagggcttccctgagtgcctgcaggctgacatctgcctgcacctgaaccgctcactgctgcagcactgcaaacccttccgaggggccaccaagggctgccttcgggccctggccatgaagttcaagaccacacatgcaccgccaggggacacactggtgcatgctggggacctgctcaccgccctgtacttcatctcccggggctccatcgagatcctgcggggcgacgtcgtcgtggccatcctggggaagaatgacatctttggggagcctctgaacctgtatgcaaggcctggcaagtcgaacggggatgtgcgggccctcacctactgtgacctacacaagatccatcgggacgacctgctggaggtgctggacatgtaccctgagttctccgaccacttctggtccagcctggagatcaccttcaacctgcgagataccaacatgatcccgggctcccccggcagtacggagttagagggtggcttcagtcggcaacgcaagcgcaagttgtccttccgcaggcgcacggacaaggacacggagcagccaggggaggtgtcggccttggggccgggccgggcgggggcagggccgagtagccggggccggccgggggggccgtggggggagagcccgtccagtggcccctccagccctgagagcagtgaggatgagggcccaggccgcagctccagccccctccgcctggtgcccttctccagccccaggccccccggagagccgccgggtggggagcccctgatggaggactgcgagaagagcagcgacacttgcagccccctgtcaggcgccttctcaggagtgtccaacattttcagcttctggggggacagtcggggccgccagtaccaggagctccctcgatgccccgcccccacccccagcctcctcaacatccccctctccagcccgggtcggcggccccggggcgacgtggagagcaggctggatgccctccagcgccagctcaacaggctggagacccggctgagtgcagacatggccactgtcctgcagctgctacagaggcagatgacgctggtcccgcccgcctacagtgctgtgaccaccccggggcctggccccacttccacatccccgctgttgcccgtcagccccctccccaccctcaccttggactcgctttctcaggtttcccagttcatggcgtgtgaggagctgcccccgggggccccagagcttccccaagaaggccccacacgacgcctctccctaccgggccagctgggggccctcacctcccagcccctgcacagacacggctcggacccgggcagttagtggggctgcccagtgtggacacgtggctcacccagggatcaaggcgctgctgggccgctccccttggaggccctgctcaggaggccctgaccgtggaaggggagaggaactcgaaagcacagctcctcccccagcccttgggaccatcttctcctgcagtcccctgggccccagtgagaggggcaggggcagggccggcagtaggtggggcctgtggtccccccactgccctgagggcattagctggtctaactgcccggaggcacccggccctgggccttaggcacctcaaggacttttctgctatttactgctcttattgttaaggataataattaaggatcatatgaataattaatgaagatgctgatgactatgaataataaataattatcctgaggaga

SEQ ID NO: 721 - DNA, 3884 bp, Homo sapiens
  source 1..3884: mol_type = genomic DNA
  misc_feature 1..3884: note = cDNA of KCNH2 gene SNP c.2956C>A (p.Pro986Thr)
atgccggtgcggaggggccacgtcgcgccgcagaacaccttcctggacaccatcatccgcaagtttgagggccagagccgtaagttcatcatcgccaacgctcgggtggagaactgcgccgtcatctactgcaacgacggcttctgcgagctgtgcggctactcgcgggccgaggtgatgcagcgaccctgcacctgcgacttcctgcacgggccgcgcacgcagcgccgcgctgccgcgcagatcgcgcaggcactgctgggcgccgaggagcgcaaagtggaaatcgccttctaccggaaagatgggagctgcttcctatgtctggtggatgtggtgcccgtgaagaacgaggatggggctgtcatcatgttcatcctcaatttcgaggtggtgatggagaaggacatggtggggtccccggctcatgacaccaaccaccggggcccccccaccagctggctggccccaggccgcgccaagaccttccgcctgaagctgcccgcgctgctggcgctgacggcccgggagtcgtcggtgcggtcgggcggcgcgggcggcgcgggcgccccgggggccgtggtggtggacgtggacctgacgcccgcggcacccagcagcgagtcgctggccctggacgaagtgacagccatggacaaccacgtggcagggctcgggcccgcggaggagcggcgtgcgctggtgggtcccggctctccgccccgcagcgcgcccggccagctcccatcgccccgggcgcacagcctcaaccccgacgcctcgggctccagctgcagcctggcccggacgcgctcccgagaaagctgcgccagcgtgcgccgcgcctcgtcggccgacgacatcgaggccatgcgcgccggggtgctgcccccgccaccgcgccacgccagcaccggggccatgcacccactgcgcagcggcttgctcaactccacctcggactccgacctcgtgcgctaccgcaccattagcaagattccccaaatcaccctcaactttgtggacctcaagggcgaccccttcttggcttcgcccaccagtgaccgtgagatcatagcacctaagataaaggagcgaacccacaatgtcactgagaaggtcacccaggtcctgtccctgggcgccgacgtgctgcctgagtacaagctgcaggcaccgcgcatccaccgctggaccatcctgcattacagccccttcaaggccgtgtgggactggctcatcctgctgctggtcatctacacggctgtcttcacaccctactcggctgccttcctgctgaaggagacggaagaaggcccgcctgctaccgagtgtggctacgcctgccagccgctggctgtggtggacctcatcgtggacatcatgttcattgtggacatcctcatcaacttccgcaccacctacgtcaatgccaacgaggaggtggtcagccaccccggccgcatcgccgtccactacttcaagggctggttcctcatcgacatggtggccgccatccccttcgacctgctcatcttcggctctggctctgaggagctgatcgggctgctgaagactgcgcggctgctgcggctggtgcgcgtggcgcggaagctggatcgctactcagagtacggcgcggccgtgctgttcttgctcatgtgcacctttgcgctcatcgcgcactggctagcctgcatctggtacgccatcggcaacatggagcagccacacatggactcacgcatcggctggctgcacaacctgggcgaccagataggcaaaccctacaacagcagcggcctgggcggcccctccatcaaggacaagtatgtgacggcgctctacttcaccttcagcagcctcaccagtgtgggcttcggcaacgtctctcccaacaccaactcagagaagatcttctccatctgcgtcatgctcattggctccctcatgtatgctagcatcttcggcaacgtgtcggccatcatccagcggctgtactcgggcacagcccgctaccacacacagatgctgcgggtgcgggagttcatccgcttccaccagatccccaatcccctgcgccagcgcctcgaggagtacttccagcacgcctggtcctacaccaacggcatcgacatgaacgcggtgctgaagggcttccctgagtgcctgcaggctgacatctgcctgcacctgaaccgctcactgctgcagcactgcaaacccttccgaggggccaccaagggctgccttcgggccctggccatgaagttcaagaccacacatgcaccgccaggggacacactggtgcatgctggggacctgctcaccgccctgtacttcatctcccggggctccatcgagatcctgcggggcgacgtcgtcgtggccatcctggggaagaatgacatctttggggagcctctgaacctgtatgcaaggcctggcaagtcgaacggggatgtgcgggccctcacctactgtgacctacacaagatccatcgggacgacctgctggaggtgctggacatgtaccctgagttctccgaccacttctggtccagcctggagatcaccttcaacctgcgagataccaacatgatcccgggctcccccggcagtacggagttagagggtggcttcagtcggcaacgcaagcgcaagttgtccttccgcaggcgcacggacaaggacacggagcagccaggggaggtgtcggccttggggccgggccgggcgggggcagggccgagtagccggggccggccgggggggccgtggggggagagcccgtccagtggcccctccagccctgagagcagtgaggatgagggcccaggccgcagctccagccccctccgcctggtgcccttctccagccccaggccccccggagagccgccgggtggggagcccctgatggaggactgcgagaagagcagcgacacttgcaacaccctgtcaggcgccttctcaggagtgtccaacattttcagcttctggggggacagtcggggccgccagtaccaggagctccctcgatgccccgcccccacccccagcctcctcaacatccccctctccagcccgggtcggcggccccggggcgacgtggagagcaggctggatgccctccagcgccagctcaacaggctggagacccggctgagtgcagacatggccactgtcctgcagctgctacagaggcagatgacgctggtcccgcccgcctacagtgctgtgaccaccccggggcctggccccacttccacatccccgctgttgcccgtcagccccctccccaccctcaccttggactcgctttctcaggtttcccagttcatggcgtgtgaggagctgcccccgggggccccagagcttccccaagaaggccccacacgacgcctctccctaccgggccagctgggggccctcacctcccagcccctgcacagacacggctcggacccgggcagttagtggggctgcccagtgtggacacgtggctcacccagggatcaaggcgctgctgggccgctccccttggaggccctgctcaggaggccctgaccgtggaaggggagaggaactcgaaagcacagctcctcccccagcccttgggaccatcttctcctgcagtcccctgggccccagtgagaggggcaggggcagggccggcagtaggtggggcctgtggtccccccactgccctgagggcattagctggtctaactgcccggaggcacccggccctgggccttaggcacctcaaggacttttctgctatttactgctcttattgttaaggataataattaaggatcatatgaataattaatgaagatgctgatgactatgaataataaataattatcctgaggaga

SEQ ID NO: 722 - DNA, 3884 bp, Homo sapiens
  source 1..3884: mol_type = genomic DNA
  misc_feature 1..3884: note = cDNA of KCNH2 gene SNP c.2962T>G (p.Ser988Ala)
atgccggtgcggaggggccacgtcgcgccgcagaacaccttcctggacaccatcatccgcaagtttgagggccagagccgtaagttcatcatcgccaacgctcgggtggagaactgcgccgtcatctactgcaacgacggcttctgcgagctgtgcggctactcgcgggccgaggtgatgcagcgaccctgcacctgcgacttcctgcacgggccgcgcacgcagcgccgcgctgccgcgcagatcgcgcaggcactgctgggcgccgaggagcgcaaagtggaaatcgccttctaccggaaagatgggagctgcttcctatgtctggtggatgtggtgcccgtgaagaacgaggatggggctgtcatcatgttcatcctcaatttcgaggtggtgatggagaaggacatggtggggtccccggctcatgacaccaaccaccggggcccccccaccagctggctggccccaggccgcgccaagaccttccgcctgaagctgcccgcgctgctggcgctgacggcccgggagtcgtcggtgcggtcgggcggcgcgggcggcgcgggcgccccgggggccgtggtggtggacgtggacctgacgcccgcggcacccagcagcgagtcgctggccctggacgaagtgacagccatggacaaccacgtggcagggctcgggcccgcggaggagcggcgtgcgctggtgggtcccggctctccgccccgcagcgcgcccggccagctcccatcgccccgggcgcacagcctcaaccccgacgcctcgggctccagctgcagcctggcccggacgcgctcccgagaaagctgcgccagcgtgcgccgcgcctcgtcggccgacgacatcgaggccatgcgcgccggggtgctgcccccgccaccgcgccacgccagcaccggggccatgcacccactgcgcagcggcttgctcaactccacctcggactccgacctcgtgcgctaccgcaccattagcaagattccccaaatcaccctcaactttgtggacctcaagggcgaccccttcttggcttcgcccaccagtgaccgtgagatcatagcacctaagataaaggagcgaacccacaatgtcactgagaaggtcacccaggtcctgtccctgggcgccgacgtgctgcctgagtacaagctgcaggcaccgcgcatccaccgctggaccatcctgcattacagccccttcaaggccgtgtgggactggctcatcctgctgctggtcatctacacggctgtcttcacaccctactcggctgccttcctgctgaaggagacggaagaaggcccgcctgctaccgagtgtggctacgcctgccagccgctggctgtggtggacctcatcgtggacatcatgttcattgtggacatcctcatcaacttccgcaccacctacgtcaatgccaacgaggaggtggtcagccaccccggccgcatcgccgtccactacttcaagggctggttcctcatcgacatggtggccgccatccccttcgacctgctcatcttcggctctggctctgaggagctgatcgggctgctgaagactgcgcggctgctgcggctggtgcgcgtggcgcggaagctggatcgctactcagagtacggcgcggccgtgctgttcttgctcatgtgcacctttgcgctcatcgcgcactggctagcctgcatctggtacgccatcggcaacatggagcagccacacatggactcacgcatcggctggctgcacaacctgggcgaccagataggcaaaccctacaacagcagcggcctgggcggcccctccatcaaggacaagtatgtgacggcgctctacttcaccttcagcagcctcaccagtgtgggcttcggcaacgtctctcccaacaccaactcagagaagatcttctccatctgcgtcatgctcattggctccctcatgtatgctagcatcttcggcaacgtgtcggccatcatccagcggctgtactcgggcacagcccgctaccacacacagatgctgcgggtgcgggagttcatccgcttccaccagatccccaatcccctgcgccagcgcctcgaggagtacttccagcacgcctggtcctacaccaacggcatcgacatgaacgcggtgctgaagggcttccctgagtgcctgcaggctgacatctgcctgcacctgaaccgctcactgctgcagcactgcaaacccttccgaggggccaccaagggctgccttcgggccctggccatgaagttcaagaccacacatgcaccgccaggggacacactggtgcatgctggggacctgctcaccgccctgtacttcatctcccggggctccatcgagatcctgcggggcgacgtcgtcgtggccatcctggggaagaatgacatctttggggagcctctgaacctgtatgcaaggcctggcaagtcgaacggggatgtgcgggccctcacctactgtgacctacacaagatccatcgggacgacctgctggaggtgctggacatgtaccctgagttctccgaccacttctggtccagcctggagatcaccttcaacctgcgagataccaacatgatcccgggctcccccggcagtacggagttagagggtggcttcagtcggcaacgcaagcgcaagttgtccttccgcaggcgcacggacaaggacacggagcagccaggggaggtgtcggccttggggccgggccgggcgggggcagggccgagtagccggggccggccgggggggccgtggggggagagcccgtccagtggcccctccagccctgagagcagtgaggatgagggcccaggccgcagctccagccccctccgcctggtgcccttctccagccccaggccccccggagagccgccgggtggggagcccctgatggaggactgcgagaagagcagcgacacttgcaaccccctggcaggcgccttctcaggagtgtccaacattttcagcttctggggggacagtcggggccgccagtaccaggagctccctcgatgccccgcccccacccccagcctcctcaacatccccctctccagcccgggtcggcggccccggggcgacgtggagagcaggctggatgccctccagcgccagctcaacaggctggagacccggctgagtgcagacatggccactgtcctgcagctgctacagaggcagatgacgctggtcccgcccgcctacagtgctgtgaccaccccggggcctggccccacttccacatccccgctgttgcccgtcagccccctccccaccctcaccttggactcgctttctcaggtttcccagttcatggcgtgtgaggagctgcccccgggggccccagagcttccccaagaaggccccacacgacgcctctccctaccgggccagctgggggccctcacctcccagcccctgcacagacacggctcggacccgggcagttagtggggctgcccagtgtggacacgtggctcacccagggatcaaggcgctgctgggccgctccccttggaggccctgctcaggaggccctgaccgtggaaggggagaggaactcgaaagcacagctcctcccccagcccttgggaccatcttctcctgcagtcccctgggccccagtgagaggggcaggggcagggccggcagtaggtggggcctgtggtccccccactgccctgagggcattagctggtctaactgcccggaggcacccggccctgggccttaggcacctcaaggacttttctgctatttactgctcttattgttaaggataataattaaggatcatatgaataattaatgaagatgctgatgactatgaataataaataattatcctgaggaga

SEQ ID NO: 723 - DNA, 3884 bp, Homo sapiens
  source 1..3884: mol_type = genomic DNA
  misc_feature 1..3884: note = cDNA of KCNH2 gene SNP c.2968G>A (p.Ala990Thr)
atgccggtgcggaggggccacgtcgcgccgcagaacaccttcctggacaccatcatccgcaagtttgagggccagagccgtaagttcatcatcgccaacgctcgggtggagaactgcgccgtcatctactgcaacgacggcttctgcgagctgtgcggctactcgcgggccgaggtgatgcagcgaccctgcacctgcgacttcctgcacgggccgcgcacgcagcgccgcgctgccgcgcagatcgcgcaggcactgctgggcgccgaggagcgcaaagtggaaatcgccttctaccggaaagatgggagctgcttcctatgtctggtggatgtggtgcccgtgaagaacgaggatggggctgtcatcatgttcatcctcaatttcgaggtggtgatggagaaggacatggtggggtccccggctcatgacaccaaccaccggggcccccccaccagctggctggccccaggccgcgccaagaccttccgcctgaagctgcccgcgctgctggcgctgacggcccgggagtcgtcggtgcggtcgggcggcgcgggcggcgcgggcgccccgggggccgtggtggtggacgtggacctgacgcccgcggcacccagcagcgagtcgctggccctggacgaagtgacagccatggacaaccacgtggcagggctcgggcccgcggaggagcggcgtgcgctggtgggtcccggctctccgccccgcagcgcgcccggccagctcccatcgccccgggcgcacagcctcaaccccgacgcctcgggctccagctgcagcctggcccggacgcgctcccgagaaagctgcgccagcgtgcgccgcgcctcgtcggccgacgacatcgaggccatgcgcgccggggtgctgcccccgccaccgcgccacgccagcaccggggccatgcacccactgcgcagcggcttgctcaactccacctcggactccgacctcgtgcgctaccgcaccattagcaagattccccaaatcaccctcaactttgtggacctcaagggcgaccccttcttggcttcgcccaccagtgaccgtgagatcatagcacctaagataaaggagcgaacccacaatgtcactgagaaggtcacccaggtcctgtccctgggcgccgacgtgctgcctgagtacaagctgcaggcaccgcgcatccaccgctggaccatcctgcattacagccccttcaaggccgtgtgggactggctcatcctgctgctggtcatctacacggctgtcttcacaccctactcggctgccttcctgctgaaggagacggaagaaggcccgcctgctaccgagtgtggctacgcctgccagccgctggctgtggtggacctcatcgtggacatcatgttcattgtggacatcctcatcaacttccgcaccacctacgtcaatgccaacgaggaggtggtcagccaccccggccgcatcgccgtccactacttcaagggctggttcctcatcgacatggtggccgccatccccttcgacctgctcatcttcggctctggctctgaggagctgatcgggctgctgaagactgcgcggctgctgcggctggtgcgcgtggcgcggaagctggatcgctactcagagtacggcgcggccgtgctgttcttgctcatgtgcacctttgcgctcatcgcgcactggctagcctgcatctggtacgccatcggcaacatggagcagccacacatggactcacgcatcggctggctgcacaacctgggcgaccagataggcaaaccctacaacagcagcggcctgggcggcccctccatcaaggacaagtatgtgacggcgctctacttcaccttcagcagcctcaccagtgtgggcttcggcaacgtctctcccaacaccaactcagagaagatcttctccatctgcgtcatgctcattggctccctcatgtatgctagcatcttcggcaacgtgtcggccatcatccagcggctgtactcgggcacagcccgctaccacacacagatgctgcgggtgcgggagttcatccgcttccaccagatccccaatcccctgcgccagcgcctcgaggagtacttccagcacgcctggtcctacaccaacggcatcgacatgaacgcggtgctgaagggcttccctgagtgcctgcaggctgacatctgcctgcacctgaaccgctcactgctgcagcactgcaaacccttccgaggggccaccaagggctgccttcgggccctggccatgaagttcaagaccacacatgcaccgccaggggacacactggtgcatgctggggacctgctcaccgccctgtacttcatctcccggggctccatcgagatcctgcggggcgacgtcgtcgtggccatcctggggaagaatgacatctttggggagcctctgaacctgtatgcaaggcctggcaagtcgaacggggatgtgcgggccctcacctactgtgacctacacaagatccatcgggacgacctgctggaggtgctggacatgtaccctgagttctccgaccacttctggtccagcctggagatcaccttcaacctgcgagataccaacatgatcccgggctcccccggcagtacggagttagagggtggcttcagtcggcaacgcaagcgcaagttgtccttccgcaggcgcacggacaaggacacggagcagccaggggaggtgtcggccttggggccgggccgggcgggggcagggccgagtagccggggccggccgggggggccgtggggggagagcccgtccagtggcccctccagccctgagagcagtgaggatgagggcccaggccgcagctccagccccctccgcctggtgcccttctccagccccaggccccccggagagccgccgggtggggagcccctgatggaggactgcgagaagagcagcgacacttgcaaccccctgtcaggcaccttctcaggagtgtccaacattttcagcttctggggggacagtcggggccgccagtaccaggagctccctcgatgccccgcccccacccccagcctcctcaacatccccctctccagcccgggtcggcggccccggggcgacgtggagagcaggctggatgccctccagcgccagctcaacaggctggagacccggctgagtgcagacatggccactgtcctgcagctgctacagaggcagatgacgctggtcccgcccgcctacagtgctgtgaccaccccggggcctggccccacttccacatccccgctgttgcccgtcagccccctccccaccctcaccttggactcgctttctcaggtttcccagttcatggcgtgtgaggagctgcccccgggggccccagagcttccccaagaaggccccacacgacgcctctccctaccgggccagctgggggccctcacctcccagcccctgcacagacacggctcggacccgggcagttagtggggctgcccagtgtggacacgtggctcacccagggatcaaggcgctgctgggccgctccccttggaggccctgctcaggaggccctgaccgtggaaggggagaggaactcgaaagcacagctcctcccccagcccttgggaccatcttctcctgcagtcccctgggccccagtgagaggggcaggggcagggccggcagtaggtggggcctgtggtccccccactgccctgagggcattagctggtctaactgcccggaggcacccggccctgggccttaggcacctcaaggacttttctgctatttactgctcttattgttaaggataataattaaggatcatatgaataattaatgaagatgctgatgactatgaataataaataattatcctgaggaga

SEQ ID NO: 724 - DNA, 3884 bp, Homo sapiens
  source 1..3884: mol_type = genomic DNA
  misc_feature 1..3884: note = cDNA of KCNH2 gene SNP c.296A>C (p.Tyr99Ser)
atgccggtgcggaggggccacgtcgcgccgcagaacaccttcctggacaccatcatccgcaagtttgagggccagagccgtaagttcatcatcgccaacgctcgggtggagaactgcgccgtcatctactgcaacgacggcttctgcgagctgtgcggctactcgcgggccgaggtgatgcagcgaccctgcacctgcgacttcctgcacgggccgcgcacgcagcgccgcgctgccgcgcagatcgcgcaggcactgctgggcgccgaggagcgcaaagtggaaatcgccttctcccggaaagatgggagctgcttcctatgtctggtggatgtggtgcccgtgaagaacgaggatggggctgtcatcatgttcatcctcaatttcgaggtggtgatggagaaggacatggtggggtccccggctcatgacaccaaccaccggggcccccccaccagctggctggccccaggccgcgccaagaccttccgcctgaagctgcccgcgctgctggcgctgacggcccgggagtcgtcggtgcggtcgggcggcgcgggcggcgcgggcgccccgggggccgtggtggtggacgtggacctgacgcccgcggcacccagcagcgagtcgctggccctggacgaagtgacagccatggacaaccacgtggcagggctcgggcccgcggaggagcggcgtgcgctggtgggtcccggctctccgccccgcagcgcgcccggccagctcccatcgccccgggcgcacagcctcaaccccgacgcctcgggctccagctgcagcctggcccggacgcgctcccgagaaagctgcgccagcgtgcgccgcgcctcgtcggccgacgacatcgaggccatgcgcgccggggtgctgcccccgccaccgcgccacgccagcaccggggccatgcacccactgcgcagcggcttgctcaactccacctcggactccgacctcgtgcgctaccgcaccattagcaagattccccaaatcaccctcaactttgtggacctcaagggcgaccccttcttggcttcgcccaccagtgaccgtgagatcatagcacctaagataaaggagcgaacccacaatgtcactgagaaggtcacccaggtcctgtccctgggcgccgacgtgctgcctgagtacaagctgcaggcaccgcgcatccaccgctggaccatcctgcattacagccccttcaaggccgtgtgggactggctcatcctgctgctggtcatctacacggctgtcttcacaccctactcggctgccttcctgctgaaggagacggaagaaggcccgcctgctaccgagtgtggctacgcctgccagccgctggctgtggtggacctcatcgtggacatcatgttcattgtggacatcctcatcaacttccgcaccacctacgtcaatgccaacgaggaggtggtcagccaccccggccgcatcgccgtccactacttcaagggctggttcctcatcgacatggtggccgccatccccttcgacctgctcatcttcggctctggctctgaggagctgatcgggctgctgaagactgcgcggctgctgcggctggtgcgcgtggcgcggaagctggatcgctactcagagtacggcgcggccgtgctgttcttgctcatgtgcacctttgcgctcatcgcgcactggctagcctgcatctggtacgccatcggcaacatggagcagccacacatggactcacgcatcggctggctgcacaacctgggcgaccagataggcaaaccctacaacagcagcggcctgggcggcccctccatcaaggacaagtatgtgacggcgctctacttcaccttcagcagcctcaccagtgtgggcttcggcaacgtctctcccaacaccaactcagagaagatcttctccatctgcgtcatgctcattggctccctcatgtatgctagcatcttcggcaacgtgtcggccatcatccagcggctgtactcgggcacagcccgctaccacacacagatgctgcgggtgcgggagttcatccgcttccaccagatccccaatcccctgcgccagcgcctcgaggagtacttccagcacgcctggtcctacaccaacggcatcgacatgaacgcggtgctgaagggcttccctgagtgcctgcaggctgacatctgcctgcacctgaaccgctcactgctgcagcactgcaaacccttccgaggggccaccaagggctgccttcgggccctggccatgaagttcaagaccacacatgcaccgccaggggacacactggtgcatgctggggacctgctcaccgccctgtacttcatctcccggggctccatcgagatcctgcggggcgacgtcgtcgtggccatcctggggaagaatgacatctttggggagcctctgaacctgtatgcaaggcctggcaagtcgaacggggatgtgcgggccctcacctactgtgacctacacaagatccatcgggacgacctgctggaggtgctggacatgtaccctgagttctccgaccacttctggtccagcctggagatcaccttcaacctgcgagataccaacatgatcccgggctcccccggcagtacggagttagagggtggcttcagtcggcaacgcaagcgcaagttgtccttccgcaggcgcacggacaaggacacggagcagccaggggaggtgtcggccttggggccgggccgggcgggggcagggccgagtagccggggccggccgggggggccgtggggggagagcccgtccagtggcccctccagccctgagagcagtgaggatgagggcccaggccgcagctccagccccctccgcctggtgcccttctccagccccaggccccccggagagccgccgggtggggagcccctgatggaggactgcgagaagagcagcgacacttgcaaccccctgtcaggcgccttctcaggagtgtccaacattttcagcttctggggggacagtcggggccgccagtaccaggagctccctcgatgccccgcccccacccccagcctcctcaacatccccctctccagcccgggtcggcggccccggggcgacgtggagagcaggctggatgccctccagcgccagctcaacaggctggagacccggctgagtgcagacatggccactgtcctgcagctgctacagaggcagatgacgctggtcccgcccgcctacagtgctgtgaccaccccggggcctggccccacttccacatccccgctgttgcccgtcagccccctccccaccctcaccttggactcgctttctcaggtttcccagttcatggcgtgtgaggagctgcccccgggggccccagagcttccccaagaaggccccacacgacgcctctccctaccgggccagctgggggccctcacctcccagcccctgcacagacacggctcggacccgggcagttagtggggctgcccagtgtggacacgtggctcacccagggatcaaggcgctgctgggccgctccccttggaggccctgctcaggaggccctgaccgtggaaggggagaggaactcgaaagcacagctcctcccccagcccttgggaccatcttctcctgcagtcccctgggccccagtgagaggggcaggggcagggccggcagtaggtggggcctgtggtccccccactgccctgagggcattagctggtctaactgcccggaggcacccggccctgggccttaggcacctcaaggacttttctgctatttactgctcttattgttaaggataataattaaggatcatatgaataattaatgaagatgctgatgactatgaataataaataattatcctgaggaga

SEQ ID NO: 725 - DNA, 3884 bp, Homo sapiens
  source 1..3884: mol_type = genomic DNA
  misc_feature 1..3884: note = cDNA of KCNH2 gene SNP c.296A>G (p.Tyr99Cys)
atgccggtgcggaggggccacgtcgcgccgcagaacaccttcctggacaccatcatccgcaagtttgagggccagagccgtaagttcatcatcgccaacgctcgggtggagaactgcgccgtcatctactgcaacgacggcttctgcgagctgtgcggctactcgcgggccgaggtgatgcagcgaccctgcacctgcgacttcctgcacgggccgcgcacgcagcgccgcgctgccgcgcagatcgcgcaggcactgctgggcgccgaggagcgcaaagtggaaatcgccttctgccggaaagatgggagctgcttcctatgtctggtggatgtggtgcccgtgaagaacgaggatggggctgtcatcatgttcatcctcaatttcgaggtggtgatggagaaggacatggtggggtccccggctcatgacaccaaccaccggggcccccccaccagctggctggccccaggccgcgccaagaccttccgcctgaagctgcccgcgctgctggcgctgacggcccgggagtcgtcggtgcggtcgggcggcgcgggcggcgcgggcgccccgggggccgtggtggtggacgtggacctgacgcccgcggcacccagcagcgagtcgctggccctggacgaagtgacagccatggacaaccacgtggcagggctcgggcccgcggaggagcggcgtgcgctggtgggtcccggctctccgccccgcagcgcgcccggccagctcccatcgccccgggcgcacagcctcaaccccgacgcctcgggctccagctgcagcctggcccggacgcgctcccgagaaagctgcgccagcgtgcgccgcgcctcgtcggccgacgacatcgaggccatgcgcgccggggtgctgcccccgccaccgcgccacgccagcaccggggccatgcacccactgcgcagcggcttgctcaactccacctcggactccgacctcgtgcgctaccgcaccattagcaagattccccaaatcaccctcaactttgtggacctcaagggcgaccccttcttggcttcgcccaccagtgaccgtgagatcatagcacctaagataaaggagcgaacccacaatgtcactgagaaggtcacccaggtcctgtccctgggcgccgacgtgctgcctgagtacaagctgcaggcaccgcgcatccaccgctggaccatcctgcattacagccccttcaaggccgtgtgggactggctcatcctgctgctggtcatctacacggctgtcttcacaccctactcggctgccttcctgctgaaggagacggaagaaggcccgcctgctaccgagtgtggctacgcctgccagccgctggctgtggtggacctcatcgtggacatcatgttcattgtggacatcctcatcaacttccgcaccacctacgtcaatgccaacgaggaggtggtcagccaccccggccgcatcgccgtccactacttcaagggctggttcctcatcgacatggtggccgccatccccttcgacctgctcatcttcggctctggctctgaggagctgatcgggctgctgaagactgcgcggctgctgcggctggtgcgcgtggcgcggaagctggatcgctactcagagtacggcgcggccgtgctgttcttgctcatgtgcacctttgcgctcatcgcgcactggctagcctgcatctggtacgccatcggcaacatggagcagccacacatggactcacgcatcggctggctgcacaacctgggcgaccagataggcaaaccctacaacagcagcggcctgggcggcccctccatcaaggacaagtatgtgacggcgctctacttcaccttcagcagcctcaccagtgtgggcttcggcaacgtctctcccaacaccaactcagagaagatcttctccatctgcgtcatgctcattggctccctcatgtatgctagcatcttcggcaacgtgtcggccatcatccagcggctgtactcgggcacagcccgctaccacacacagatgctgcgggtgcgggagttcatccgcttccaccagatccccaatcccctgcgccagcgcctcgaggagtacttccagcacgcctggtcctacaccaacggcatcgacatgaacgcggtgctgaagggcttccctgagtgcctgcaggctgacatctgcctgcacctgaaccgctcactgctgcagcactgcaaacccttccgaggggccaccaagggctgccttcgggccctggccatgaagttcaagaccacacatgcaccgccaggggacacactggtgcatgctggggacctgctcaccgccctgtacttcatctcccggggctccatcgagatcctgcggggcgacgtcgtcgtggccatcctggggaagaatgacatctttggggagcctctgaacctgtatgcaaggcctggcaagtcgaacggggatgtgcgggccctcacctactgtgacctacacaagatccatcgggacgacctgctggaggtgctggacatgtaccctgagttctccgaccacttctggtccagcctggagatcaccttcaacctgcgagataccaacatgatcccgggctcccccggcagtacggagttagagggtggcttcagtcggcaacgcaagcgcaagttgtccttccgcaggcgcacggacaaggacacggagcagccaggggaggtgtcggccttggggccgggccgggcgggggcagggccgagtagccggggccggccgggggggccgtggggggagagcccgtccagtggcccctccagccctgagagcagtgaggatgagggcccaggccgcagctccagccccctccgcctggtgcccttctccagccccaggccccccggagagccgccgggtggggagcccctgatggaggactgcgagaagagcagcgacacttgcaaccccctgtcaggcgccttctcaggagtgtccaacattttcagcttctggggggacagtcggggccgccagtaccaggagctccctcgatgccccgcccccacccccagcctcctcaacatccccctctccagcccgggtcggcggccccggggcgacgtggagagcaggctggatgccctccagcgccagctcaacaggctggagacccggctgagtgcagacatggccactgtcctgcagctgctacagaggcagatgacgctggtcccgcccgcctacagtgctgtgaccaccccggggcctggccccacttccacatccccgctgttgcccgtcagccccctccccaccctcaccttggactcgctttctcaggtttcccagttcatggcgtgtgaggagctgcccccgggggccccagagcttccccaagaaggccccacacgacgcctctccctaccgggccagctgggggccctcacctcccagcccctgcacagacacggctcggacccgggcagttagtggggctgcccagtgtggacacgtggctcacccagggatcaaggcgctgctgggccgctccccttggaggccctgctcaggaggccctgaccgtggaaggggagaggaactcgaaagcacagctcctcccccagcccttgggaccatcttctcctgcagtcccctgggccccagtgagaggggcaggggcagggccggcagtaggtggggcctgtggtccccccactgccctgagggcattagctggtctaactgcccggaggcacccggccctgggccttaggcacctcaaggacttttctgctatttactgctcttattgttaaggataataattaaggatcatatgaataattaatgaagatgctgatgactatgaataataaataattatcctgaggaga

SEQ ID NO: 726 - DNA, 3884 bp, Homo sapiens
  source 1..3884: mol_type = genomic DNA
  misc_feature 1..3884: note = cDNA of KCNH2 gene SNP c.2987A>T (p.Asn996Ile)
atgccggtgcggaggggccacgtcgcgccgcagaacaccttcctggacaccatcatccgcaagtttgagggccagagccgtaagttcatcatcgccaacgctcgggtggagaactgcgccgtcatctactgcaacgacggcttctgcgagctgtgcggctactcgcgggccgaggtgatgcagcgaccctgcacctgcgacttcctgcacgggccgcgcacgcagcgccgcgctgccgcgcagatcgcgcaggcactgctgggcgccgaggagcgcaaagtggaaatcgccttctaccggaaagatgggagctgcttcctatgtctggtggatgtggtgcccgtgaagaacgaggatggggctgtcatcatgttcatcctcaatttcgaggtggtgatggagaaggacatggtggggtccccggctcatgacaccaaccaccggggcccccccaccagctggctggccccaggccgcgccaagaccttccgcctgaagctgcccgcgctgctggcgctgacggcccgggagtcgtcggtgcggtcgggcggcgcgggcggcgcgggcgccccgggggccgtggtggtggacgtggacctgacgcccgcggcacccagcagcgagtcgctggccctggacgaagtgacagccatggacaaccacgtggcagggctcgggcccgcggaggagcggcgtgcgctggtgggtcccggctctccgccccgcagcgcgcccggccagctcccatcgccccgggcgcacagcctcaaccccgacgcctcgggctccagctgcagcctggcccggacgcgctcccgagaaagctgcgccagcgtgcgccgcgcctcgtcggccgacgacatcgaggccatgcgcgccggggtgctgcccccgccaccgcgccacgccagcaccggggccatgcacccactgcgcagcggcttgctcaactccacctcggactccgacctcgtgcgctaccgcaccattagcaagattccccaaatcaccctcaactttgtggacctcaagggcgaccccttcttggcttcgcccaccagtgaccgtgagatcatagcacctaagataaaggagcgaacccacaatgtcactgagaaggtcacccaggtcctgtccctgggcgccgacgtgctgcctgagtacaagctgcaggcaccgcgcatccaccgctggaccatcctgcattacagccccttcaaggccgtgtgggactggctcatcctgctgctggtcatctacacggctgtcttcacaccctactcggctgccttcctgctgaaggagacggaagaaggcccgcctgctaccgagtgtggctacgcctgccagccgctggctgtggtggacctcatcgtggacatcatgttcattgtggacatcctcatcaacttccgcaccacctacgtcaatgccaacgaggaggtggtcagccaccccggccgcatcgccgtccactacttcaagggctggttcctcatcgacatggtggccgccatccccttcgacctgctcatcttcggctctggctctgaggagctgatcgggctgctgaagactgcgcggctgctgcggctggtgcgcgtggcgcggaagctggatcgctactcagagtacggcgcggccgtgctgttcttgctcatgtgcacctttgcgctcatcgcgcactggctagcctgcatctggtacgccatcggcaacatggagcagccacacatggactcacgcatcggctggctgcacaacctgggcgaccagataggcaaaccctacaacagcagcggcctgggcggcccctccatcaaggacaagtatgtgacggcgctctacttcaccttcagcagcctcaccagtgtgggcttcggcaacgtctctcccaacaccaactcagagaagatcttctccatctgcgtcatgctcattggctccctcatgtatgctagcatcttcggcaacgtgtcggccatcatccagcggctgtactcgggcacagcccgctaccacacacagatgctgcgggtgcgggagttcatccgcttccaccagatccccaatcccctgcgccagcgcctcgaggagtacttccagcacgcctggtcctacaccaacggcatcgacatgaacgcggtgctgaagggcttccctgagtgcctgcaggctgacatctgcctgcacctgaaccgctcactgctgcagcactgcaaacccttccgaggggccaccaagggctgccttcgggccctggccatgaagttcaagaccacacatgcaccgccaggggacacactggtgcatgctggggacctgctcaccgccctgtacttcatctcccggggctccatcgagatcctgcggggcgacgtcgtcgtggccatcctggggaagaatgacatctttggggagcctctgaacctgtatgcaaggcctggcaagtcgaacggggatgtgcgggccctcacctactgtgacctacacaagatccatcgggacgacctgctggaggtgctggacatgtaccctgagttctccgaccacttctggtccagcctggagatcaccttcaacctgcgagataccaacatgatcccgggctcccccggcagtacggagttagagggtggcttcagtcggcaacgcaagcgcaagttgtccttccgcaggcgcacggacaaggacacggagcagccaggggaggtgtcggccttggggccgggccgggcgggggcagggccgagtagccggggccggccgggggggccgtggggggagagcccgtccagtggcccctccagccctgagagcagtgaggatgagggcccaggccgcagctccagccccctccgcctggtgcccttctccagccccaggccccccggagagccgccgggtggggagcccctgatggaggactgcgagaagagcagcgacacttgcaaccccctgtcaggcgccttctcaggagtgtccatcattttcagcttctggggggacagtcggggccgccagtaccaggagctccctcgatgccccgcccccacccccagcctcctcaacatccccctctccagcccgggtcggcggccccggggcgacgtggagagcaggctggatgccctccagcgccagctcaacaggctggagacccggctgagtgcagacatggccactgtcctgcagctgctacagaggcagatgacgctggtcccgcccgcctacagtgctgtgaccaccccggggcctggccccacttccacatccccgctgttgcccgtcagccccctccccaccctcaccttggactcgctttctcaggtttcccagttcatggcgtgtgaggagctgcccccgggggccccagagcttccccaagaaggccccacacgacgcctctccctaccgggccagctgggggccctcacctcccagcccctgcacagacacggctcggacccgggcagttagtggggctgcccagtgtggacacgtggctcacccagggatcaaggcgctgctgggccgctccccttggaggccctgctcaggaggccctgaccgtggaaggggagaggaactcgaaagcacagctcctcccccagcccttgggaccatcttctcctgcagtcccctgggccccagtgagaggggcaggggcagggccggcagtaggtggggcctgtggtccccccactgccctgagggcattagctggtctaactgcccggaggcacccggccctgggccttaggcacctcaaggacttttctgctatttactgctcttattgttaaggataataattaaggatcatatgaataattaatgaagatgctgatgactatgaataataaataattatcctgaggaga

SEQ ID NO: 727 - DNA, 3884 bp, Homo sapiens
  source 1..3884: mol_type = genomic DNA
  misc_feature 1..3884: note = cDNA of KCNH2 gene SNP c.298C>G (p.Arg100Gly)
atgccggtgcggaggggccacgtcgcgccgcagaacaccttcctggacaccatcatccgcaagtttgagggccagagccgtaagttcatcatcgccaacgctcgggtggagaactgcgccgtcatctactgcaacgacggcttctgcgagctgtgcggctactcgcgggccgaggtgatgcagcgaccctgcacctgcgacttcctgcacgggccgcgcacgcagcgccgcgctgccgcgcagatcgcgcaggcactgctgggcgccgaggagcgcaaagtggaaatcgccttctacgggaaagatgggagctgcttcctatgtctggtggatgtggtgcccgtgaagaacgaggatggggctgtcatcatgttcatcctcaatttcgaggtggtgatggagaaggacatggtggggtccccggctcatgacaccaaccaccggggcccccccaccagctggctggccccaggccgcgccaagaccttccgcctgaagctgcccgcgctgctggcgctgacggcccgggagtcgtcggtgcggtcgggcggcgcgggcggcgcgggcgccccgggggccgtggtggtggacgtggacctgacgcccgcggcacccagcagcgagtcgctggccctggacgaagtgacagccatggacaaccacgtggcagggctcgggcccgcggaggagcggcgtgcgctggtgggtcccggctctccgccccgcagcgcgcccggccagctcccatcgccccgggcgcacagcctcaaccccgacgcctcgggctccagctgcagcctggcccggacgcgctcccgagaaagctgcgccagcgtgcgccgcgcctcgtcggccgacgacatcgaggccatgcgcgccggggtgctgcccccgccaccgcgccacgccagcaccggggccatgcacccactgcgcagcggcttgctcaactccacctcggactccgacctcgtgcgctaccgcaccattagcaagattccccaaatcaccctcaactttgtggacctcaagggcgaccccttcttggcttcgcccaccagtgaccgtgagatcatagcacctaagataaaggagcgaacccacaatgtcactgagaaggtcacccaggtcctgtccctgggcgccgacgtgctgcctgagtacaagctgcaggcaccgcgcatccaccgctggaccatcctgcattacagccccttcaaggccgtgtgggactggctcatcctgctgctggtcatctacacggctgtcttcacaccctactcggctgccttcctgctgaaggagacggaagaaggcccgcctgctaccgagtgtggctacgcctgccagccgctggctgtggtggacctcatcgtggacatcatgttcattgtggacatcctcatcaacttccgcaccacctacgtcaatgccaacgaggaggtggtcagccaccccggccgcatcgccgtccactacttcaagggctggttcctcatcgacatggtggccgccatccccttcgacctgctcatcttcggctctggctctgaggagctgatcgggctgctgaagactgcgcggctgctgcggctggtgcgcgtggcgcggaagctggatcgctactcagagtacggcgcggccgtgctgttcttgctcatgtgcacctttgcgctcatcgcgcactggctagcctgcatctggtacgccatcggcaacatggagcagccacacatggactcacgcatcggctggctgcacaacctgggcgaccagataggcaaaccctacaacagcagcggcctgggcggcccctccatcaaggacaagtatgtgacggcgctctacttcaccttcagcagcctcaccagtgtgggcttcggcaacgtctctcccaacaccaactcagagaagatcttctccatctgcgtcatgctcattggctccctcatgtatgctagcatcttcggcaacgtgtcggccatcatccagcggctgtactcgggcacagcccgctaccacacacagatgctgcgggtgcgggagttcatccgcttccaccagatccccaatcccctgcgccagcgcctcgaggagtacttccagcacgcctggtcctacaccaacggcatcgacatgaacgcggtgctgaagggcttccctgagtgcctgcaggctgacatctgcctgcacctgaaccgctcactgctgcagcactgcaaacccttccgaggggccaccaagggctgccttcgggccctggccatgaagttcaagaccacacatgcaccgccaggggacacactggtgcatgctggggacctgctcaccgccctgtacttcatctcccggggctccatcgagatcctgcggggcgacgtcgtcgtggccatcctggggaagaatgacatctttggggagcctctgaacctgtatgcaaggcctggcaagtcgaacggggatgtgcgggccctcacctactgtgacctacacaagatccatcgggacgacctgctggaggtgctggacatgtaccctgagttctccgaccacttctggtccagcctggagatcaccttcaacctgcgagataccaacatgatcccgggctcccccggcagtacggagttagagggtggcttcagtcggcaacgcaagcgcaagttgtccttccgcaggcgcacggacaaggacacggagcagccaggggaggtgtcggccttggggccgggccgggcgggggcagggccgagtagccggggccggccgggggggccgtggggggagagcccgtccagtggcccctccagccctgagagcagtgaggatgagggcccaggccgcagctccagccccctccgcctggtgcccttctccagccccaggccccccggagagccgccgggtggggagcccctgatggaggactgcgagaagagcagcgacacttgcaaccccctgtcaggcgccttctcaggagtgtccaacattttcagcttctggggggacagtcggggccgccagtaccaggagctccctcgatgccccgcccccacccccagcctcctcaacatccccctctccagcccgggtcggcggccccggggcgacgtggagagcaggctggatgccctccagcgccagctcaacaggctggagacccggctgagtgcagacatggccactgtcctgcagctgctacagaggcagatgacgctggtcccgcccgcctacagtgctgtgaccaccccggggcctggccccacttccacatccccgctgttgcccgtcagccccctccccaccctcaccttggactcgctttctcaggtttcccagttcatggcgtgtgaggagctgcccccgggggccccagagcttccccaagaaggccccacacgacgcctctccctaccgggccagctgggggccctcacctcccagcccctgcacagacacggctcggacccgggcagttagtggggctgcccagtgtggacacgtggctcacccagggatcaaggcgctgctgggccgctccccttggaggccctgctcaggaggccctgaccgtggaaggggagaggaactcgaaagcacagctcctcccccagcccttgggaccatcttctcctgcagtcccctgggccccagtgagaggggcaggggcagggccggcagtaggtggggcctgtggtccccccactgccctgagggcattagctggtctaactgcccggaggcacccggccctgggccttaggcacctcaaggacttttctgctatttactgctcttattgttaaggataataattaaggatcatatgaataattaatgaagatgctgatgactatgaataataaataattatcctgaggaga

SEQ ID NO: 728 - DNA, 3884 bp, Homo sapiens
  source 1..3884: mol_type = genomic DNA
  misc_feature 1..3884: note = cDNA of KCNH2 gene SNP c.298C>T (p.Arg100Trp)
atgccggtgcggaggggccacgtcgcgccgcagaacaccttcctggacaccatcatccgcaagtttgagggccagagccgtaagttcatcatcgccaacgctcgggtggagaactgcgccgtcatctactgcaacgacggcttctgcgagctgtgcggctactcgcgggccgaggtgatgcagcgaccctgcacctgcgacttcctgcacgggccgcgcacgcagcgccgcgctgccgcgcagatcgcgcaggcactgctgggcgccgaggagcgcaaagtggaaatcgccttctactggaaagatgggagctgcttcctatgtctggtggatgtggtgcccgtgaagaacgaggatggggctgtcatcatgttcatcctcaatttcgaggtggtgatggagaaggacatggtggggtccccggctcatgacaccaaccaccggggcccccccaccagctggctggccccaggccgcgccaagaccttccgcctgaagctgcccgcgctgctggcgctgacggcccgggagtcgtcggtgcggtcgggcggcgcgggcggcgcgggcgccccgggggccgtggtggtggacgtggacctgacgcccgcggcacccagcagcgagtcgctggccctggacgaagtgacagccatggacaaccacgtggcagggctcgggcccgcggaggagcggcgtgcgctggtgggtcccggctctccgccccgcagcgcgcccggccagctcccatcgccccgggcgcacagcctcaaccccgacgcctcgggctccagctgcagcctggcccggacgcgctcccgagaaagctgcgccagcgtgcgccgcgcctcgtcggccgacgacatcgaggccatgcgcgccggggtgctgcccccgccaccgcgccacgccagcaccggggccatgcacccactgcgcagcggcttgctcaactccacctcggactccgacctcgtgcgctaccgcaccattagcaagattccccaaatcaccctcaactttgtggacctcaagggcgaccccttcttggcttcgcccaccagtgaccgtgagatcatagcacctaagataaaggagcgaacccacaatgtcactgagaaggtcacccaggtcctgtccctgggcgccgacgtgctgcctgagtacaagctgcaggcaccgcgcatccaccgctggaccatcctgcattacagccccttcaaggccgtgtgggactggctcatcctgctgctggtcatctacacggctgtcttcacaccctactcggctgccttcctgctgaaggagacggaagaaggcccgcctgctaccgagtgtggctacgcctgccagccgctggctgtggtggacctcatcgtggacatcatgttcattgtggacatcctcatcaacttccgcaccacctacgtcaatgccaacgaggaggtggtcagccaccccggccgcatcgccgtccactacttcaagggctggttcctcatcgacatggtggccgccatccccttcgacctgctcatcttcggctctggctctgaggagctgatcgggctgctgaagactgcgcggctgctgcggctggtgcgcgtggcgcggaagctggatcgctactcagagtacggcgcggccgtgctgttcttgctcatgtgcacctttgcgctcatcgcgcactggctagcctgcatctggtacgccatcggcaacatggagcagccacacatggactcacgcatcggctggctgcacaacctgggcgaccagataggcaaaccctacaacagcagcggcctgggcggcccctccatcaaggacaagtatgtgacggcgctctacttcaccttcagcagcctcaccagtgtgggcttcggcaacgtctctcccaacaccaactcagagaagatcttctccatctgcgtcatgctcattggctccctcatgtatgctagcatcttcggcaacgtgtcggccatcatccagcggctgtactcgggcacagcccgctaccacacacagatgctgcgggtgcgggagttcatccgcttccaccagatccccaatcccctgcgccagcgcctcgaggagtacttccagcacgcctggtcctacaccaacggcatcgacatgaacgcggtgctgaagggcttccctgagtgcctgcaggctgacatctgcctgcacctgaaccgctcactgctgcagcactgcaaacccttccgaggggccaccaagggctgccttcgggccctggccatgaagttcaagaccacacatgcaccgccaggggacacactggtgcatgctggggacctgctcaccgccctgtacttcatctcccggggctccatcgagatcctgcggggcgacgtcgtcgtggccatcctggggaagaatgacatctttggggagcctctgaacctgtatgcaaggcctggcaagtcgaacggggatgtgcgggccctcacctactgtgacctacacaagatccatcgggacgacctgctggaggtgctggacatgtaccctgagttctccgaccacttctggtccagcctggagatcaccttcaacctgcgagataccaacatgatcccgggctcccccggcagtacggagttagagggtggcttcagtcggcaacgcaagcgcaagttgtccttccgcaggcgcacggacaaggacacggagcagccaggggaggtgtcggccttggggccgggccgggcgggggcagggccgagtagccggggccggccgggggggccgtggggggagagcccgtccagtggcccctccagccctgagagcagtgaggatgagggcccaggccgcagctccagccccctccgcctggtgcccttctccagccccaggccccccggagagccgccgggtggggagcccctgatggaggactgcgagaagagcagcgacacttgcaaccccctgtcaggcgccttctcaggagtgtccaacattttcagcttctggggggacagtcggggccgccagtaccaggagctccctcgatgccccgcccccacccccagcctcctcaacatccccctctccagcccgggtcggcggccccggggcgacgtggagagcaggctggatgccctccagcgccagctcaacaggctggagacccggctgagtgcagacatggccactgtcctgcagctgctacagaggcagatgacgctggtcccgcccgcctacagtgctgtgaccaccccggggcctggccccacttccacatccccgctgttgcccgtcagccccctccccaccctcaccttggactcgctttctcaggtttcccagttcatggcgtgtgaggagctgcccccgggggccccagagcttccccaagaaggccccacacgacgcctctccctaccgggccagctgggggccctcacctcccagcccctgcacagacacggctcggacccgggcagttagtggggctgcccagtgtggacacgtggctcacccagggatcaaggcgctgctgggccgctccccttggaggccctgctcaggaggccctgaccgtggaaggggagaggaactcgaaagcacagctcctcccccagcccttgggaccatcttctcctgcagtcccctgggccccagtgagaggggcaggggcagggccggcagtaggtggggcctgtggtccccccactgccctgagggcattagctggtctaactgcccggaggcacccggccctgggccttaggcacctcaaggacttttctgctatttactgctcttattgttaaggataataattaaggatcatatgaataattaatgaagatgctgatgactatgaataataaataattatcctgaggaga

SEQ ID NO: 729 - DNA, 3884 bp, Homo sapiens
  source 1..3884: mol_type = genomic DNA
  misc_feature 1..3884: note = cDNA of KCNH2 gene SNP c.2996G>A (p.Ser999Asn)
atgccggtgcggaggggccacgtcgcgccgcagaacaccttcctggacaccatcatccgcaagtttgagggccagagccgtaagttcatcatcgccaacgctcgggtggagaactgcgccgtcatctactgcaacgacggcttctgcgagctgtgcggctactcgcgggccgaggtgatgcagcgaccctgcacctgcgacttcctgcacgggccgcgcacgcagcgccgcgctgccgcgcagatcgcgcaggcactgctgggcgccgaggagcgcaaagtggaaatcgccttctaccggaaagatgggagctgcttcctatgtctggtggatgtggtgcccgtgaagaacgaggatggggctgtcatcatgttcatcctcaatttcgaggtggtgatggagaaggacatggtggggtccccggctcatgacaccaaccaccggggcccccccaccagctggctggccccaggccgcgccaagaccttccgcctgaagctgcccgcgctgctggcgctgacggcccgggagtcgtcggtgcggtcgggcggcgcgggcggcgcgggcgccccgggggccgtggtggtggacgtggacctgacgcccgcggcacccagcagcgagtcgctggccctggacgaagtgacagccatggacaaccacgtggcagggctcgggcccgcggaggagcggcgtgcgctggtgggtcccggctctccgccccgcagcgcgcccggccagctcccatcgccccgggcgcacagcctcaaccccgacgcctcgggctccagctgcagcctggcccggacgcgctcccgagaaagctgcgccagcgtgcgccgcgcctcgtcggccgacgacatcgaggccatgcgcgccggggtgctgcccccgccaccgcgccacgccagcaccggggccatgcacccactgcgcagcggcttgctcaactccacctcggactccgacctcgtgcgctaccgcaccattagcaagattccccaaatcaccctcaactttgtggacctcaagggcgaccccttcttggcttcgcccaccagtgaccgtgagatcatagcacctaagataaaggagcgaacccacaatgtcactgagaaggtcacccaggtcctgtccctgggcgccgacgtgctgcctgagtacaagctgcaggcaccgcgcatccaccgctggaccatcctgcattacagccccttcaaggccgtgtgggactggctcatcctgctgctggtcatctacacggctgtcttcacaccctactcggctgccttcctgctgaaggagacggaagaaggcccgcctgctaccgagtgtggctacgcctgccagccgctggctgtggtggacctcatcgtggacatcatgttcattgtggacatcctcatcaacttccgcaccacctacgtcaatgccaacgaggaggtggtcagccaccccggccgcatcgccgtccactacttcaagggctggttcctcatcgacatggtggccgccatccccttcgacctgctcatcttcggctctggctctgaggagctgatcgggctgctgaagactgcgcggctgctgcggctggtgcgcgtggcgcggaagctggatcgctactcagagtacggcgcggccgtgctgttcttgctcatgtgcacctttgcgctcatcgcgcactggctagcctgcatctggtacgccatcggcaacatggagcagccacacatggactcacgcatcggctggctgcacaacctgggcgaccagataggcaaaccctacaacagcagcggcctgggcggcccctccatcaaggacaagtatgtgacggcgctctacttcaccttcagcagcctcaccagtgtgggcttcggcaacgtctctcccaacaccaactcagagaagatcttctccatctgcgtcatgctcattggctccctcatgtatgctagcatcttcggcaacgtgtcggccatcatccagcggctgtactcgggcacagcccgctaccacacacagatgctgcgggtgcgggagttcatccgcttccaccagatccccaatcccctgcgccagcgcctcgaggagtacttccagcacgcctggtcctacaccaacggcatcgacatgaacgcggtgctgaagggcttccctgagtgcctgcaggctgacatctgcctgcacctgaaccgctcactgctgcagcactgcaaacccttccgaggggccaccaagggctgccttcgggccctggccatgaagttcaagaccacacatgcaccgccaggggacacactggtgcatgctggggacctgctcaccgccctgtacttcatctcccggggctccatcgagatcctgcggggcgacgtcgtcgtggccatcctggggaagaatgacatctttggggagcctctgaacctgtatgcaaggcctggcaagtcgaacggggatgtgcgggccctcacctactgtgacctacacaagatccatcgggacgacctgctggaggtgctggacatgtaccctgagttctccgaccacttctggtccagcctggagatcaccttcaacctgcgagataccaacatgatcccgggctcccccggcagtacggagttagagggtggcttcagtcggcaacgcaagcgcaagttgtccttccgcaggcgcacggacaaggacacggagcagccaggggaggtgtcggccttggggccgggccgggcgggggcagggccgagtagccggggccggccgggggggccgtggggggagagcccgtccagtggcccctccagccctgagagcagtgaggatgagggcccaggccgcagctccagccccctccgcctggtgcccttctccagccccaggccccccggagagccgccgggtggggagcccctgatggaggactgcgagaagagcagcgacacttgcaaccccctgtcaggcgccttctcaggagtgtccaacattttcaacttctggggggacagtcggggccgccagtaccaggagctccctcgatgccccgcccccacccccagcctcctcaacatccccctctccagcccgggtcggcggccccggggcgacgtggagagcaggctggatgccctccagcgccagctcaacaggctggagacccggctgagtgcagacatggccactgtcctgcagctgctacagaggcagatgacgctggtcccgcccgcctacagtgctgtgaccaccccggggcctggccccacttccacatccccgctgttgcccgtcagccccctccccaccctcaccttggactcgctttctcaggtttcccagttcatggcgtgtgaggagctgcccccgggggccccagagcttccccaagaaggccccacacgacgcctctccctaccgggccagctgggggccctcacctcccagcccctgcacagacacggctcggacccgggcagttagtggggctgcccagtgtggacacgtggctcacccagggatcaaggcgctgctgggccgctccccttggaggccctgctcaggaggccctgaccgtggaaggggagaggaactcgaaagcacagctcctcccccagcccttgggaccatcttctcctgcagtcccctgggccccagtgagaggggcaggggcagggccggcagtaggtggggcctgtggtccccccactgccctgagggcattagctggtctaactgcccggaggcacccggccctgggccttaggcacctcaaggacttttctgctatttactgctcttattgttaaggataataattaaggatcatatgaataattaatgaagatgctgatgactatgaataataaataattatcctgaggaga

SEQ ID NO: 730 - DNA, 3884 bp, Homo sapiens
  source 1..3884: mol_type = genomic DNA
  misc_feature 1..3884: note = cDNA of KCNH2 gene SNP c.299G>A (p.Arg100Gln)
atgccggtgcggaggggccacgtcgcgccgcagaacaccttcctggacaccatcatccgcaagtttgagggccagagccgtaagttcatcatcgccaacgctcgggtggagaactgcgccgtcatctactgcaacgacggcttctgcgagctgtgcggctactcgcgggccgaggtgatgcagcgaccctgcacctgcgacttcctgcacgggccgcgcacgcagcgccgcgctgccgcgcagatcgcgcaggcactgctgggcgccgaggagcgcaaagtggaaatcgccttctaccagaaagatgggagctgcttcctatgtctggtggatgtggtgcccgtgaagaacgaggatggggctgtcatcatgttcatcctcaatttcgaggtggtgatggagaaggacatggtggggtccccggctcatgacaccaaccaccggggcccccccaccagctggctggccccaggccgcgccaagaccttccgcctgaagctgcccgcgctgctggcgctgacggcccgggagtcgtcggtgcggtcgggcggcgcgggcggcgcgggcgccccgggggccgtggtggtggacgtggacctgacgcccgcggcacccagcagcgagtcgctggccctggacgaagtgacagccatggacaaccacgtggcagggctcgggcccgcggaggagcggcgtgcgctggtgggtcccggctctccgccccgcagcgcgcccggccagctcccatcgccccgggcgcacagcctcaaccccgacgcctcgggctccagctgcagcctggcccggacgcgctcccgagaaagctgcgccagcgtgcgccgcgcctcgtcggccgacgacatcgaggccatgcgcgccggggtgctgcccccgccaccgcgccacgccagcaccggggccatgcacccactgcgcagcggcttgctcaactccacctcggactccgacctcgtgcgctaccgcaccattagcaagattccccaaatcaccctcaactttgtggacctcaagggcgaccccttcttggcttcgcccaccagtgaccgtgagatcatagcacctaagataaaggagcgaacccacaatgtcactgagaaggtcacccaggtcctgtccctgggcgccgacgtgctgcctgagtacaagctgcaggcaccgcgcatccaccgctggaccatcctgcattacagccccttcaaggccgtgtgggactggctcatcctgctgctggtcatctacacggctgtcttcacaccctactcggctgccttcctgctgaaggagacggaagaaggcccgcctgctaccgagtgtggctacgcctgccagccgctggctgtggtggacctcatcgtggacatcatgttcattgtggacatcctcatcaacttccgcaccacctacgtcaatgccaacgaggaggtggtcagccaccccggccgcatcgccgtccactacttcaagggctggttcctcatcgacatggtggccgccatccccttcgacctgctcatcttcggctctggctctgaggagctgatcgggctgctgaagactgcgcggctgctgcggctggtgcgcgtggcgcggaagctggatcgctactcagagtacggcgcggccgtgctgttcttgctcatgtgcacctttgcgctcatcgcgcactggctagcctgcatctggtacgccatcggcaacatggagcagccacacatggactcacgcatcggctggctgcacaacctgggcgaccagataggcaaaccctacaacagcagcggcctgggcggcccctccatcaaggacaagtatgtgacggcgctctacttcaccttcagcagcctcaccagtgtgggcttcggcaacgtctctcccaacaccaactcagagaagatcttctccatctgcgtcatgctcattggctccctcatgtatgctagcatcttcggcaacgtgtcggccatcatccagcggctgtactcgggcacagcccgctaccacacacagatgctgcgggtgcgggagttcatccgcttccaccagatccccaatcccctgcgccagcgcctcgaggagtacttccagcacgcctggtcctacaccaacggcatcgacatgaacgcggtgctgaagggcttccctgagtgcctgcaggctgacatctgcctgcacctgaaccgctcactgctgcagcactgcaaacccttccgaggggccaccaagggctgccttcgggccctggccatgaagttcaagaccacacatgcaccgccaggggacacactggtgcatgctggggacctgctcaccgccctgtacttcatctcccggggctccatcgagatcctgcggggcgacgtcgtcgtggccatcctggggaagaatgacatctttggggagcctctgaacctgtatgcaaggcctggcaagtcgaacggggatgtgcgggccctcacctactgtgacctacacaagatccatcgggacgacctgctggaggtgctggacatgtaccctgagttctccgaccacttctggtccagcctggagatcaccttcaacctgcgagataccaacatgatcccgggctcccccggcagtacggagttagagggtggcttcagtcggcaacgcaagcgcaagttgtccttccgcaggcgcacggacaaggacacggagcagccaggggaggtgtcggccttggggccgggccgggcgggggcagggccgagtagccggggccggccgggggggccgtggggggagagcccgtccagtggcccctccagccctgagagcagtgaggatgagggcccaggccgcagctccagccccctccgcctggtgcccttctccagccccaggccccccggagagccgccgggtggggagcccctgatggaggactgcgagaagagcagcgacacttgcaaccccctgtcaggcgccttctcaggagtgtccaacattttcagcttctggggggacagtcggggccgccagtaccaggagctccctcgatgccccgcccccacccccagcctcctcaacatccccctctccagcccgggtcggcggccccggggcgacgtggagagcaggctggatgccctccagcgccagctcaacaggctggagacccggctgagtgcagacatggccactgtcctgcagctgctacagaggcagatgacgctggtcccgcccgcctacagtgctgtgaccaccccggggcctggccccacttccacatccccgctgttgcccgtcagccccctccccaccctcaccttggactcgctttctcaggtttcccagttcatggcgtgtgaggagctgcccccgggggccccagagcttccccaagaaggccccacacgacgcctctccctaccgggccagctgggggccctcacctcccagcccctgcacagacacggctcggacccgggcagttagtggggctgcccagtgtggacacgtggctcacccagggatcaaggcgctgctgggccgctccccttggaggccctgctcaggaggccctgaccgtggaaggggagaggaactcgaaagcacagctcctcccccagcccttgggaccatcttctcctgcagtcccctgggccccagtgagaggggcaggggcagggccggcagtaggtggggcctgtggtccccccactgccctgagggcattagctggtctaactgcccggaggcacccggccctgggccttaggcacctcaaggacttttctgctatttactgctcttattgttaaggataataattaaggatcatatgaataattaatgaagatgctgatgactatgaataataaataattatcctgaggaga

SEQ ID NO: 731 - DNA, 3884 bp, Homo sapiens
  source 1..3884: mol_type = genomic DNA
  misc_feature 1..3884: note = cDNA of KCNH2 gene SNP c.299G>T (p.Arg100Leu)
atgccggtgcggaggggccacgtcgcgccgcagaacaccttcctggacaccatcatccgcaagtttgagggccagagccgtaagttcatcatcgccaacgctcgggtggagaactgcgccgtcatctactgcaacgacggcttctgcgagctgtgcggctactcgcgggccgaggtgatgcagcgaccctgcacctgcgacttcctgcacgggccgcgcacgcagcgccgcgctgccgcgcagatcgcgcaggcactgctgggcgccgaggagcgcaaagtggaaatcgccttctacctgaaagatgggagctgcttcctatgtctggtggatgtggtgcccgtgaagaacgaggatggggctgtcatcatgttcatcctcaatttcgaggtggtgatggagaaggacatggtggggtccccggctcatgacaccaaccaccggggcccccccaccagctggctggccccaggccgcgccaagaccttccgcctgaagctgcccgcgctgctggcgctgacggcccgggagtcgtcggtgcggtcgggcggcgcgggcggcgcgggcgccccgggggccgtggtggtggacgtggacctgacgcccgcggcacccagcagcgagtcgctggccctggacgaagtgacagccatggacaaccacgtggcagggctcgggcccgcggaggagcggcgtgcgctggtgggtcccggctctccgccccgcagcgcgcccggccagctcccatcgccccgggcgcacagcctcaaccccgacgcctcgggctccagctgcagcctggcccggacgcgctcccgagaaagctgcgccagcgtgcgccgcgcctcgtcggccgacgacatcgaggccatgcgcgccggggtgctgcccccgccaccgcgccacgccagcaccggggccatgcacccactgcgcagcggcttgctcaactccacctcggactccgacctcgtgcgctaccgcaccattagcaagattccccaaatcaccctcaactttgtggacctcaagggcgaccccttcttggcttcgcccaccagtgaccgtgagatcatagcacctaagataaaggagcgaacccacaatgtcactgagaaggtcacccaggtcctgtccctgggcgccgacgtgctgcctgagtacaagctgcaggcaccgcgcatccaccgctggaccatcctgcattacagccccttcaaggccgtgtgggactggctcatcctgctgctggtcatctacacggctgtcttcacaccctactcggctgccttcctgctgaaggagacggaagaaggcccgcctgctaccgagtgtggctacgcctgccagccgctggctgtggtggacctcatcgtggacatcatgttcattgtggacatcctcatcaacttccgcaccacctacgtcaatgccaacgaggaggtggtcagccaccccggccgcatcgccgtccactacttcaagggctggttcctcatcgacatggtggccgccatccccttcgacctgctcatcttcggctctggctctgaggagctgatcgggctgctgaagactgcgcggctgctgcggctggtgcgcgtggcgcggaagctggatcgctactcagagtacggcgcggccgtgctgttcttgctcatgtgcacctttgcgctcatcgcgcactggctagcctgcatctggtacgccatcggcaacatggagcagccacacatggactcacgcatcggctggctgcacaacctgggcgaccagataggcaaaccctacaacagcagcggcctgggcggcccctccatcaaggacaagtatgtgacggcgctctacttcaccttcagcagcctcaccagtgtgggcttcggcaacgtctctcccaacaccaactcagagaagatcttctccatctgcgtcatgctcattggctccctcatgtatgctagcatcttcggcaacgtgtcggccatcatccagcggctgtactcgggcacagcccgctaccacacacagatgctgcgggtgcgggagttcatccgcttccaccagatccccaatcccctgcgccagcgcctcgaggagtacttccagcacgcctggtcctacaccaacggcatcgacatgaacgcggtgctgaagggcttccctgagtgcctgcaggctgacatctgcctgcacctgaaccgctcactgctgcagcactgcaaacccttccgaggggccaccaagggctgccttcgggccctggccatgaagttcaagaccacacatgcaccgccaggggacacactggtgcatgctggggacctgctcaccgccctgtacttcatctcccggggctccatcgagatcctgcggggcgacgtcgtcgtggccatcctggggaagaatgacatctttggggagcctctgaacctgtatgcaaggcctggcaagtcgaacggggatgtgcgggccctcacctactgtgacctacacaagatccatcgggacgacctgctggaggtgctggacatgtaccctgagttctccgaccacttctggtccagcctggagatcaccttcaacctgcgagataccaacatgatcccgggctcccccggcagtacggagttagagggtggcttcagtcggcaacgcaagcgcaagttgtccttccgcaggcgcacggacaaggacacggagcagccaggggaggtgtcggccttggggccgggccgggcgggggcagggccgagtagccggggccggccgggggggccgtggggggagagcccgtccagtggcccctccagccctgagagcagtgaggatgagggcccaggccgcagctccagccccctccgcctggtgcccttctccagccccaggccccccggagagccgccgggtggggagcccctgatggaggactgcgagaagagcagcgacacttgcaaccccctgtcaggcgccttctcaggagtgtccaacattttcagcttctggggggacagtcggggccgccagtaccaggagctccctcgatgccccgcccccacccccagcctcctcaacatccccctctccagcccgggtcggcggccccggggcgacgtggagagcaggctggatgccctccagcgccagctcaacaggctggagacccggctgagtgcagacatggccactgtcctgcagctgctacagaggcagatgacgctggtcccgcccgcctacagtgctgtgaccaccccggggcctggccccacttccacatccccgctgttgcccgtcagccccctccccaccctcaccttggactcgctttctcaggtttcccagttcatggcgtgtgaggagctgcccccgggggccccagagcttccccaagaaggccccacacgacgcctctccctaccgggccagctgggggccctcacctcccagcccctgcacagacacggctcggacccgggcagttagtggggctgcccagtgtggacacgtggctcacccagggatcaaggcgctgctgggccgctccccttggaggccctgctcaggaggccctgaccgtggaaggggagaggaactcgaaagcacagctcctcccccagcccttgggaccatcttctcctgcagtcccctgggccccagtgagaggggcaggggcagggccggcagtaggtggggcctgtggtccccccactgccctgagggcattagctggtctaactgcccggaggcacccggccctgggccttaggcacctcaaggacttttctgctatttactgctcttattgttaaggataataattaaggatcatatgaataattaatgaagatgctgatgactatgaataataaataattatcctgaggaga

SEQ ID NO: 732 - DNA, 3884 bp, Homo sapiens
  source 1..3884: mol_type = genomic DNA
  misc_feature 1..3884: note = cDNA of KCNH2 gene SNP c.29C>T (p.Pro10Leu)
atgccggtgcggaggggccacgtcgcgctgcagaacaccttcctggacaccatcatccgcaagtttgagggccagagccgtaagttcatcatcgccaacgctcgggtggagaactgcgccgtcatctactgcaacgacggcttctgcgagctgtgcggctactcgcgggccgaggtgatgcagcgaccctgcacctgcgacttcctgcacgggccgcgcacgcagcgccgcgctgccgcgcagatcgcgcaggcactgctgggcgccgaggagcgcaaagtggaaatcgccttctaccggaaagatgggagctgcttcctatgtctggtggatgtggtgcccgtgaagaacgaggatggggctgtcatcatgttcatcctcaatttcgaggtggtgatggagaaggacatggtggggtccccggctcatgacaccaaccaccggggcccccccaccagctggctggccccaggccgcgccaagaccttccgcctgaagctgcccgcgctgctggcgctgacggcccgggagtcgtcggtgcggtcgggcggcgcgggcggcgcgggcgccccgggggccgtggtggtggacgtggacctgacgcccgcggcacccagcagcgagtcgctggccctggacgaagtgacagccatggacaaccacgtggcagggctcgggcccgcggaggagcggcgtgcgctggtgggtcccggctctccgccccgcagcgcgcccggccagctcccatcgccccgggcgcacagcctcaaccccgacgcctcgggctccagctgcagcctggcccggacgcgctcccgagaaagctgcgccagcgtgcgccgcgcctcgtcggccgacgacatcgaggccatgcgcgccggggtgctgcccccgccaccgcgccacgccagcaccggggccatgcacccactgcgcagcggcttgctcaactccacctcggactccgacctcgtgcgctaccgcaccattagcaagattccccaaatcaccctcaactttgtggacctcaagggcgaccccttcttggcttcgcccaccagtgaccgtgagatcatagcacctaagataaaggagcgaacccacaatgtcactgagaaggtcacccaggtcctgtccctgggcgccgacgtgctgcctgagtacaagctgcaggcaccgcgcatccaccgctggaccatcctgcattacagccccttcaaggccgtgtgggactggctcatcctgctgctggtcatctacacggctgtcttcacaccctactcggctgccttcctgctgaaggagacggaagaaggcccgcctgctaccgagtgtggctacgcctgccagccgctggctgtggtggacctcatcgtggacatcatgttcattgtggacatcctcatcaacttccgcaccacctacgtcaatgccaacgaggaggtggtcagccaccccggccgcatcgccgtccactacttcaagggctggttcctcatcgacatggtggccgccatccccttcgacctgctcatcttcggctctggctctgaggagctgatcgggctgctgaagactgcgcggctgctgcggctggtgcgcgtggcgcggaagctggatcgctactcagagtacggcgcggccgtgctgttcttgctcatgtgcacctttgcgctcatcgcgcactggctagcctgcatctggtacgccatcggcaacatggagcagccacacatggactcacgcatcggctggctgcacaacctgggcgaccagataggcaaaccctacaacagcagcggcctgggcggcccctccatcaaggacaagtatgtgacggcgctctacttcaccttcagcagcctcaccagtgtgggcttcggcaacgtctctcccaacaccaactcagagaagatcttctccatctgcgtcatgctcattggctccctcatgtatgctagcatcttcggcaacgtgtcggccatcatccagcggctgtactcgggcacagcccgctaccacacacagatgctgcgggtgcgggagttcatccgcttccaccagatccccaatcccctgcgccagcgcctcgaggagtacttccagcacgcctggtcctacaccaacggcatcgacatgaacgcggtgctgaagggcttccctgagtgcctgcaggctgacatctgcctgcacctgaaccgctcactgctgcagcactgcaaacccttccgaggggccaccaagggctgccttcgggccctggccatgaagttcaagaccacacatgcaccgccaggggacacactggtgcatgctggggacctgctcaccgccctgtacttcatctcccggggctccatcgagatcctgcggggcgacgtcgtcgtggccatcctggggaagaatgacatctttggggagcctctgaacctgtatgcaaggcctggcaagtcgaacggggatgtgcgggccctcacctactgtgacctacacaagatccatcgggacgacctgctggaggtgctggacatgtaccctgagttctccgaccacttctggtccagcctggagatcaccttcaacctgcgagataccaacatgatcccgggctcccccggcagtacggagttagagggtggcttcagtcggcaacgcaagcgcaagttgtccttccgcaggcgcacggacaaggacacggagcagccaggggaggtgtcggccttggggccgggccgggcgggggcagggccgagtagccggggccggccgggggggccgtggggggagagcccgtccagtggcccctccagccctgagagcagtgaggatgagggcccaggccgcagctccagccccctccgcctggtgcccttctccagccccaggccccccggagagccgccgggtggggagcccctgatggaggactgcgagaagagcagcgacacttgcaaccccctgtcaggcgccttctcaggagtgtccaacattttcagcttctggggggacagtcggggccgccagtaccaggagctccctcgatgccccgcccccacccccagcctcctcaacatccccctctccagcccgggtcggcggccccggggcgacgtggagagcaggctggatgccctccagcgccagctcaacaggctggagacccggctgagtgcagacatggccactgtcctgcagctgctacagaggcagatgacgctggtcccgcccgcctacagtgctgtgaccaccccggggcctggccccacttccacatccccgctgttgcccgtcagccccctccccaccctcaccttggactcgctttctcaggtttcccagttcatggcgtgtgaggagctgcccccgggggccccagagcttccccaagaaggccccacacgacgcctctccctaccgggccagctgggggccctcacctcccagcccctgcacagacacggctcggacccgggcagttagtggggctgcccagtgtggacacgtggctcacccagggatcaaggcgctgctgggccgctccccttggaggccctgctcaggaggccctgaccgtggaaggggagaggaactcgaaagcacagctcctcccccagcccttgggaccatcttctcctgcagtcccctgggccccagtgagaggggcaggggcagggccggcagtaggtggggcctgtggtccccccactgccctgagggcattagctggtctaactgcccggaggcacccggccctgggccttaggcacctcaaggacttttctgctatttactgctcttattgttaaggataataattaaggatcatatgaataattaatgaagatgctgatgactatgaataataaataattatcctgaggaga

SEQ ID NO: 733 - DNA, 3884 bp, Homo sapiens
  source 1..3884: mol_type = genomic DNA
  misc_feature 1..3884: note = cDNA of KCNH2 gene SNP c.3002G>A (p.Trp1001Ter)
atgccggtgcggaggggccacgtcgcgccgcagaacaccttcctggacaccatcatccgcaagtttgagggccagagccgtaagttcatcatcgccaacgctcgggtggagaactgcgccgtcatctactgcaacgacggcttctgcgagctgtgcggctactcgcgggccgaggtgatgcagcgaccctgcacctgcgacttcctgcacgggccgcgcacgcagcgccgcgctgccgcgcagatcgcgcaggcactgctgggcgccgaggagcgcaaagtggaaatcgccttctaccggaaagatgggagctgcttcctatgtctggtggatgtggtgcccgtgaagaacgaggatggggctgtcatcatgttcatcctcaatttcgaggtggtgatggagaaggacatggtggggtccccggctcatgacaccaaccaccggggcccccccaccagctggctggccccaggccgcgccaagaccttccgcctgaagctgcccgcgctgctggcgctgacggcccgggagtcgtcggtgcggtcgggcggcgcgggcggcgcgggcgccccgggggccgtggtggtggacgtggacctgacgcccgcggcacccagcagcgagtcgctggccctggacgaagtgacagccatggacaaccacgtggcagggctcgggcccgcggaggagcggcgtgcgctggtgggtcccggctctccgccccgcagcgcgcccggccagctcccatcgccccgggcgcacagcctcaaccccgacgcctcgggctccagctgcagcctggcccggacgcgctcccgagaaagctgcgccagcgtgcgccgcgcctcgtcggccgacgacatcgaggccatgcgcgccggggtgctgcccccgccaccgcgccacgccagcaccggggccatgcacccactgcgcagcggcttgctcaactccacctcggactccgacctcgtgcgctaccgcaccattagcaagattccccaaatcaccctcaactttgtggacctcaagggcgaccccttcttggcttcgcccaccagtgaccgtgagatcatagcacctaagataaaggagcgaacccacaatgtcactgagaaggtcacccaggtcctgtccctgggcgccgacgtgctgcctgagtacaagctgcaggcaccgcgcatccaccgctggaccatcctgcattacagccccttcaaggccgtgtgggactggctcatcctgctgctggtcatctacacggctgtcttcacaccctactcggctgccttcctgctgaaggagacggaagaaggcccgcctgctaccgagtgtggctacgcctgccagccgctggctgtggtggacctcatcgtggacatcatgttcattgtggacatcctcatcaacttccgcaccacctacgtcaatgccaacgaggaggtggtcagccaccccggccgcatcgccgtccactacttcaagggctggttcctcatcgacatggtggccgccatccccttcgacctgctcatcttcggctctggctctgaggagctgatcgggctgctgaagactgcgcggctgctgcggctggtgcgcgtggcgcggaagctggatcgctactcagagtacggcgcggccgtgctgttcttgctcatgtgcacctttgcgctcatcgcgcactggctagcctgcatctggtacgccatcggcaacatggagcagccacacatggactcacgcatcggctggctgcacaacctgggcgaccagataggcaaaccctacaacagcagcggcctgggcggcccctccatcaaggacaagtatgtgacggcgctctacttcaccttcagcagcctcaccagtgtgggcttcggcaacgtctctcccaacaccaactcagagaagatcttctccatctgcgtcatgctcattggctccctcatgtatgctagcatcttcggcaacgtgtcggccatcatccagcggctgtactcgggcacagcccgctaccacacacagatgctgcgggtgcgggagttcatccgcttccaccagatccccaatcccctgcgccagcgcctcgaggagtacttccagcacgcctggtcctacaccaacggcatcgacatgaacgcggtgctgaagggcttccctgagtgcctgcaggctgacatctgcctgcacctgaaccgctcactgctgcagcactgcaaacccttccgaggggccaccaagggctgccttcgggccctggccatgaagttcaagaccacacatgcaccgccaggggacacactggtgcatgctggggacctgctcaccgccctgtacttcatctcccggggctccatcgagatcctgcggggcgacgtcgtcgtggccatcctggggaagaatgacatctttggggagcctctgaacctgtatgcaaggcctggcaagtcgaacggggatgtgcgggccctcacctactgtgacctacacaagatccatcgggacgacctgctggaggtgctggacatgtaccctgagttctccgaccacttctggtccagcctggagatcaccttcaacctgcgagataccaacatgatcccgggctcccccggcagtacggagttagagggtggcttcagtcggcaacgcaagcgcaagttgtccttccgcaggcgcacggacaaggacacggagcagccaggggaggtgtcggccttggggccgggccgggcgggggcagggccgagtagccggggccggccgggggggccgtggggggagagcccgtccagtggcccctccagccctgagagcagtgaggatgagggcccaggccgcagctccagccccctccgcctggtgcccttctccagccccaggccccccggagagccgccgggtggggagcccctgatggaggactgcgagaagagcagcgacacttgcaaccccctgtcaggcgccttctcaggagtgtccaacattttcagcttctagggggacagtcggggccgccagtaccaggagctccctcgatgccccgcccccacccccagcctcctcaacatccccctctccagcccgggtcggcggccccggggcgacgtggagagcaggctggatgccctccagcgccagctcaacaggctggagacccggctgagtgcagacatggccactgtcctgcagctgctacagaggcagatgacgctggtcccgcccgcctacagtgctgtgaccaccccggggcctggccccacttccacatccccgctgttgcccgtcagccccctccccaccctcaccttggactcgctttctcaggtttcccagttcatggcgtgtgaggagctgcccccgggggccccagagcttccccaagaaggccccacacgacgcctctccctaccgggccagctgggggccctcacctcccagcccctgcacagacacggctcggacccgggcagttagtggggctgcccagtgtggacacgtggctcacccagggatcaaggcgctgctgggccgctccccttggaggccctgctcaggaggccctgaccgtggaaggggagaggaactcgaaagcacagctcctcccccagcccttgggaccatcttctcctgcagtcccctgggccccagtgagaggggcaggggcagggccggcagtaggtggggcctgtggtccccccactgccctgagggcattagctggtctaactgcccggaggcacccggccctgggccttaggcacctcaaggacttttctgctatttactgctcttattgttaaggataataattaaggatcatatgaataattaatgaagatgctgatgactatgaataataaataattatcctgaggaga

SEQ ID NO: 734 - DNA, 3884 bp, Homo sapiens
  source 1..3884: mol_type = genomic DNA
  misc_feature 1..3884: note = cDNA of KCNH2 gene SNP c.3003G>A (p.Trp1001Ter)
atgccggtgcggaggggccacgtcgcgccgcagaacaccttcctggacaccatcatccgcaagtttgagggccagagccgtaagttcatcatcgccaacgctcgggtggagaactgcgccgtcatctactgcaacgacggcttctgcgagctgtgcggctactcgcgggccgaggtgatgcagcgaccctgcacctgcgacttcctgcacgggccgcgcacgcagcgccgcgctgccgcgcagatcgcgcaggcactgctgggcgccgaggagcgcaaagtggaaatcgccttctaccggaaagatgggagctgcttcctatgtctggtggatgtggtgcccgtgaagaacgaggatggggctgtcatcatgttcatcctcaatttcgaggtggtgatggagaaggacatggtggggtccccggctcatgacaccaaccaccggggcccccccaccagctggctggccccaggccgcgccaagaccttccgcctgaagctgcccgcgctgctggcgctgacggcccgggagtcgtcggtgcggtcgggcggcgcgggcggcgcgggcgccccgggggccgtggtggtggacgtggacctgacgcccgcggcacccagcagcgagtcgctggccctggacgaagtgacagccatggacaaccacgtggcagggctcgggcccgcggaggagcggcgtgcgctggtgggtcccggctctccgccccgcagcgcgcccggccagctcccatcgccccgggcgcacagcctcaaccccgacgcctcgggctccagctgcagcctggcccggacgcgctcccgagaaagctgcgccagcgtgcgccgcgcctcgtcggccgacgacatcgaggccatgcgcgccggggtgctgcccccgccaccgcgccacgccagcaccggggccatgcacccactgcgcagcggcttgctcaactccacctcggactccgacctcgtgcgctaccgcaccattagcaagattccccaaatcaccctcaactttgtggacctcaagggcgaccccttcttggcttcgcccaccagtgaccgtgagatcatagcacctaagataaaggagcgaacccacaatgtcactgagaaggtcacccaggtcctgtccctgggcgccgacgtgctgcctgagtacaagctgcaggcaccgcgcatccaccgctggaccatcctgcattacagccccttcaaggccgtgtgggactggctcatcctgctgctggtcatctacacggctgtcttcacaccctactcggctgccttcctgctgaaggagacggaagaaggcccgcctgctaccgagtgtggctacgcctgccagccgctggctgtggtggacctcatcgtggacatcatgttcattgtggacatcctcatcaacttccgcaccacctacgtcaatgccaacgaggaggtggtcagccaccccggccgcatcgccgtccactacttcaagggctggttcctcatcgacatggtggccgccatccccttcgacctgctcatcttcggctctggctctgaggagctgatcgggctgctgaagactgcgcggctgctgcggctggtgcgcgtggcgcggaagctggatcgctactcagagtacggcgcggccgtgctgttcttgctcatgtgcacctttgcgctcatcgcgcactggctagcctgcatctggtacgccatcggcaacatggagcagccacacatggactcacgcatcggctggctgcacaacctgggcgaccagataggcaaaccctacaacagcagcggcctgggcggcccctccatcaaggacaagtatgtgacggcgctctacttcaccttcagcagcctcaccagtgtgggcttcggcaacgtctctcccaacaccaactcagagaagatcttctccatctgcgtcatgctcattggctccctcatgtatgctagcatcttcggcaacgtgtcggccatcatccagcggctgtactcgggcacagcccgctaccacacacagatgctgcgggtgcgggagttcatccgcttccaccagatccccaatcccctgcgccagcgcctcgaggagtacttccagcacgcctggtcctacaccaacggcatcgacatgaacgcggtgctgaagggcttccctgagtgcctgcaggctgacatctgcctgcacctgaaccgctcactgctgcagcactgcaaacccttccgaggggccaccaagggctgccttcgggccctggccatgaagttcaagaccacacatgcaccgccaggggacacactggtgcatgctggggacctgctcaccgccctgtacttcatctcccggggctccatcgagatcctgcggggcgacgtcgtcgtggccatcctggggaagaatgacatctttggggagcctctgaacctgtatgcaaggcctggcaagtcgaacggggatgtgcgggccctcacctactgtgacctacacaagatccatcgggacgacctgctggaggtgctggacatgtaccctgagttctccgaccacttctggtccagcctggagatcaccttcaacctgcgagataccaacatgatcccgggctcccccggcagtacggagttagagggtggcttcagtcggcaacgcaagcgcaagttgtccttccgcaggcgcacggacaaggacacggagcagccaggggaggtgtcggccttggggccgggccgggcgggggcagggccgagtagccggggccggccgggggggccgtggggggagagcccgtccagtggcccctccagccctgagagcagtgaggatgagggcccaggccgcagctccagccccctccgcctggtgcccttctccagccccaggccccccggagagccgccgggtggggagcccctgatggaggactgcgagaagagcagcgacacttgcaaccccctgtcaggcgccttctcaggagtgtccaacattttcagcttctgaggggacagtcggggccgccagtaccaggagctccctcgatgccccgcccccacccccagcctcctcaacatccccctctccagcccgggtcggcggccccggggcgacgtggagagcaggctggatgccctccagcgccagctcaacaggctggagacccggctgagtgcagacatggccactgtcctgcagctgctacagaggcagatgacgctggtcccgcccgcctacagtgctgtgaccaccccggggcctggccccacttccacatccccgctgttgcccgtcagccccctccccaccctcaccttggactcgctttctcaggtttcccagttcatggcgtgtgaggagctgcccccgggggccccagagcttccccaagaaggccccacacgacgcctctccctaccgggccagctgggggccctcacctcccagcccctgcacagacacggctcggacccgggcagttagtggggctgcccagtgtggacacgtggctcacccagggatcaaggcgctgctgggccgctccccttggaggccctgctcaggaggccctgaccgtggaaggggagaggaactcgaaagcacagctcctcccccagcccttgggaccatcttctcctgcagtcccctgggccccagtgagaggggcaggggcagggccggcagtaggtggggcctgtggtccccccactgccctgagggcattagctggtctaactgcccggaggcacccggccctgggccttaggcacctcaaggacttttctgctatttactgctcttattgttaaggataataattaaggatcatatgaataattaatgaagatgctgatgactatgaataataaataattatcctgaggaga

SEQ ID NO: 735 - DNA, 3884 bp, Homo sapiens
  source 1..3884: mol_type = genomic DNA
  misc_feature 1..3884: note = cDNA of KCNH2 gene SNP c.3003G>C (p.Trp1001Cys)
atgccggtgcggaggggccacgtcgcgccgcagaacaccttcctggacaccatcatccgcaagtttgagggccagagccgtaagttcatcatcgccaacgctcgggtggagaactgcgccgtcatctactgcaacgacggcttctgcgagctgtgcggctactcgcgggccgaggtgatgcagcgaccctgcacctgcgacttcctgcacgggccgcgcacgcagcgccgcgctgccgcgcagatcgcgcaggcactgctgggcgccgaggagcgcaaagtggaaatcgccttctaccggaaagatgggagctgcttcctatgtctggtggatgtggtgcccgtgaagaacgaggatggggctgtcatcatgttcatcctcaatttcgaggtggtgatggagaaggacatggtggggtccccggctcatgacaccaaccaccggggcccccccaccagctggctggccccaggccgcgccaagaccttccgcctgaagctgcccgcgctgctggcgctgacggcccgggagtcgtcggtgcggtcgggcggcgcgggcggcgcgggcgccccgggggccgtggtggtggacgtggacctgacgcccgcggcacccagcagcgagtcgctggccctggacgaagtgacagccatggacaaccacgtggcagggctcgggcccgcggaggagcggcgtgcgctggtgggtcccggctctccgccccgcagcgcgcccggccagctcccatcgccccgggcgcacagcctcaaccccgacgcctcgggctccagctgcagcctggcccggacgcgctcccgagaaagctgcgccagcgtgcgccgcgcctcgtcggccgacgacatcgaggccatgcgcgccggggtgctgcccccgccaccgcgccacgccagcaccggggccatgcacccactgcgcagcggcttgctcaactccacctcggactccgacctcgtgcgctaccgcaccattagcaagattccccaaatcaccctcaactttgtggacctcaagggcgaccccttcttggcttcgcccaccagtgaccgtgagatcatagcacctaagataaaggagcgaacccacaatgtcactgagaaggtcacccaggtcctgtccctgggcgccgacgtgctgcctgagtacaagctgcaggcaccgcgcatccaccgctggaccatcctgcattacagccccttcaaggccgtgtgggactggctcatcctgctgctggtcatctacacggctgtcttcacaccctactcggctgccttcctgctgaaggagacggaagaaggcccgcctgctaccgagtgtggctacgcctgccagccgctggctgtggtggacctcatcgtggacatcatgttcattgtggacatcctcatcaacttccgcaccacctacgtcaatgccaacgaggaggtggtcagccaccccggccgcatcgccgtccactacttcaagggctggttcctcatcgacatggtggccgccatccccttcgacctgctcatcttcggctctggctctgaggagctgatcgggctgctgaagactgcgcggctgctgcggctggtgcgcgtggcgcggaagctggatcgctactcagagtacggcgcggccgtgctgttcttgctcatgtgcacctttgcgctcatcgcgcactggctagcctgcatctggtacgccatcggcaacatggagcagccacacatggactcacgcatcggctggctgcacaacctgggcgaccagataggcaaaccctacaacagcagcggcctgggcggcccctccatcaaggacaagtatgtgacggcgctctacttcaccttcagcagcctcaccagtgtgggcttcggcaacgtctctcccaacaccaactcagagaagatcttctccatctgcgtcatgctcattggctccctcatgtatgctagcatcttcggcaacgtgtcggccatcatccagcggctgtactcgggcacagcccgctaccacacacagatgctgcgggtgcgggagttcatccgcttccaccagatccccaatcccctgcgccagcgcctcgaggagtacttccagcacgcctggtcctacaccaacggcatcgacatgaacgcggtgctgaagggcttccctgagtgcctgcaggctgacatctgcctgcacctgaaccgctcactgctgcagcactgcaaacccttccgaggggccaccaagggctgccttcgggccctggccatgaagttcaagaccacacatgcaccgccaggggacacactggtgcatgctggggacctgctcaccgccctgtacttcatctcccggggctccatcgagatcctgcggggcgacgtcgtcgtggccatcctggggaagaatgacatctttggggagcctctgaacctgtatgcaaggcctggcaagtcgaacggggatgtgcgggccctcacctactgtgacctacacaagatccatcgggacgacctgctggaggtgctggacatgtaccctgagttctccgaccacttctggtccagcctggagatcaccttcaacctgcgagataccaacatgatcccgggctcccccggcagtacggagttagagggtggcttcagtcggcaacgcaagcgcaagttgtccttccgcaggcgcacggacaaggacacggagcagccaggggaggtgtcggccttggggccgggccgggcgggggcagggccgagtagccggggccggccgggggggccgtggggggagagcccgtccagtggcccctccagccctgagagcagtgaggatgagggcccaggccgcagctccagccccctccgcctggtgcccttctccagccccaggccccccggagagccgccgggtggggagcccctgatggaggactgcgagaagagcagcgacacttgcaaccccctgtcaggcgccttctcaggagtgtccaacattttcagcttctgcggggacagtcggggccgccagtaccaggagctccctcgatgccccgcccccacccccagcctcctcaacatccccctctccagcccgggtcggcggccccggggcgacgtggagagcaggctggatgccctccagcgccagctcaacaggctggagacccggctgagtgcagacatggccactgtcctgcagctgctacagaggcagatgacgctggtcccgcccgcctacagtgctgtgaccaccccggggcctggccccacttccacatccccgctgttgcccgtcagccccctccccaccctcaccttggactcgctttctcaggtttcccagttcatggcgtgtgaggagctgcccccgggggccccagagcttccccaagaaggccccacacgacgcctctccctaccgggccagctgggggccctcacctcccagcccctgcacagacacggctcggacccgggcagttagtggggctgcccagtgtggacacgtggctcacccagggatcaaggcgctgctgggccgctccccttggaggccctgctcaggaggccctgaccgtggaaggggagaggaactcgaaagcacagctcctcccccagcccttgggaccatcttctcctgcagtcccctgggccccagtgagaggggcaggggcagggccggcagtaggtggggcctgtggtccccccactgccctgagggcattagctggtctaactgcccggaggcacccggccctgggccttaggcacctcaaggacttttctgctatttactgctcttattgttaaggataataattaaggatcatatgaataattaatgaagatgctgatgactatgaataataaataattatcctgaggaga

SEQ ID NO: 736 - DNA, 3884 bp, Homo sapiens
  source 1..3884: mol_type = genomic DNA
  misc_feature 1..3884: note = cDNA of KCNH2 gene SNP c.3007G>A (p.Asp1003Asn)
atgccggtgcggaggggccacgtcgcgccgcagaacaccttcctggacaccatcatccgcaagtttgagggccagagccgtaagttcatcatcgccaacgctcgggtggagaactgcgccgtcatctactgcaacgacggcttctgcgagctgtgcggctactcgcgggccgaggtgatgcagcgaccctgcacctgcgacttcctgcacgggccgcgcacgcagcgccgcgctgccgcgcagatcgcgcaggcactgctgggcgccgaggagcgcaaagtggaaatcgccttctaccggaaagatgggagctgcttcctatgtctggtggatgtggtgcccgtgaagaacgaggatggggctgtcatcatgttcatcctcaatttcgaggtggtgatggagaaggacatggtggggtccccggctcatgacaccaaccaccggggcccccccaccagctggctggccccaggccgcgccaagaccttccgcctgaagctgcccgcgctgctggcgctgacggcccgggagtcgtcggtgcggtcgggcggcgcgggcggcgcgggcgccccgggggccgtggtggtggacgtggacctgacgcccgcggcacccagcagcgagtcgctggccctggacgaagtgacagccatggacaaccacgtggcagggctcgggcccgcggaggagcggcgtgcgctggtgggtcccggctctccgccccgcagcgcgcccggccagctcccatcgccccgggcgcacagcctcaaccccgacgcctcgggctccagctgcagcctggcccggacgcgctcccgagaaagctgcgccagcgtgcgccgcgcctcgtcggccgacgacatcgaggccatgcgcgccggggtgctgcccccgccaccgcgccacgccagcaccggggccatgcacccactgcgcagcggcttgctcaactccacctcggactccgacctcgtgcgctaccgcaccattagcaagattccccaaatcaccctcaactttgtggacctcaagggcgaccccttcttggcttcgcccaccagtgaccgtgagatcatagcacctaagataaaggagcgaacccacaatgtcactgagaaggtcacccaggtcctgtccctgggcgccgacgtgctgcctgagtacaagctgcaggcaccgcgcatccaccgctggaccatcctgcattacagccccttcaaggccgtgtgggactggctcatcctgctgctggtcatctacacggctgtcttcacaccctactcggctgccttcctgctgaaggagacggaagaaggcccgcctgctaccgagtgtggctacgcctgccagccgctggctgtggtggacctcatcgtggacatcatgttcattgtggacatcctcatcaacttccgcaccacctacgtcaatgccaacgaggaggtggtcagccaccccggccgcatcgccgtccactacttcaagggctggttcctcatcgacatggtggccgccatccccttcgacctgctcatcttcggctctggctctgaggagctgatcgggctgctgaagactgcgcggctgctgcggctggtgcgcgtggcgcggaagctggatcgctactcagagtacggcgcggccgtgctgttcttgctcatgtgcacctttgcgctcatcgcgcactggctagcctgcatctggtacgccatcggcaacatggagcagccacacatggactcacgcatcggctggctgcacaacctgggcgaccagataggcaaaccctacaacagcagcggcctgggcggcccctccatcaaggacaagtatgtgacggcgctctacttcaccttcagcagcctcaccagtgtgggcttcggcaacgtctctcccaacaccaactcagagaagatcttctccatctgcgtcatgctcattggctccctcatgtatgctagcatcttcggcaacgtgtcggccatcatccagcggctgtactcgggcacagcccgctaccacacacagatgctgcgggtgcgggagttcatccgcttccaccagatccccaatcccctgcgccagcgcctcgaggagtacttccagcacgcctggtcctacaccaacggcatcgacatgaacgcggtgctgaagggcttccctgagtgcctgcaggctgacatctgcctgcacctgaaccgctcactgctgcagcactgcaaacccttccgaggggccaccaagggctgccttcgggccctggccatgaagttcaagaccacacatgcaccgccaggggacacactggtgcatgctggggacctgctcaccgccctgtacttcatctcccggggctccatcgagatcctgcggggcgacgtcgtcgtggccatcctggggaagaatgacatctttggggagcctctgaacctgtatgcaaggcctggcaagtcgaacggggatgtgcgggccctcacctactgtgacctacacaagatccatcgggacgacctgctggaggtgctggacatgtaccctgagttctccgaccacttctggtccagcctggagatcaccttcaacctgcgagataccaacatgatcccgggctcccccggcagtacggagttagagggtggcttcagtcggcaacgcaagcgcaagttgtccttccgcaggcgcacggacaaggacacggagcagccaggggaggtgtcggccttggggccgggccgggcgggggcagggccgagtagccggggccggccgggggggccgtggggggagagcccgtccagtggcccctccagccctgagagcagtgaggatgagggcccaggccgcagctccagccccctccgcctggtgcccttctccagccccaggccccccggagagccgccgggtggggagcccctgatggaggactgcgagaagagcagcgacacttgcaaccccctgtcaggcgccttctcaggagtgtccaacattttcagcttctgggggaacagtcggggccgccagtaccaggagctccctcgatgccccgcccccacccccagcctcctcaacatccccctctccagcccgggtcggcggccccggggcgacgtggagagcaggctggatgccctccagcgccagctcaacaggctggagacccggctgagtgcagacatggccactgtcctgcagctgctacagaggcagatgacgctggtcccgcccgcctacagtgctgtgaccaccccggggcctggccccacttccacatccccgctgttgcccgtcagccccctccccaccctcaccttggactcgctttctcaggtttcccagttcatggcgtgtgaggagctgcccccgggggccccagagcttccccaagaaggccccacacgacgcctctccctaccgggccagctgggggccctcacctcccagcccctgcacagacacggctcggacccgggcagttagtggggctgcccagtgtggacacgtggctcacccagggatcaaggcgctgctgggccgctccccttggaggccctgctcaggaggccctgaccgtggaaggggagaggaactcgaaagcacagctcctcccccagcccttgggaccatcttctcctgcagtcccctgggccccagtgagaggggcaggggcagggccggcagtaggtggggcctgtggtccccccactgccctgagggcattagctggtctaactgcccggaggcacccggccctgggccttaggcacctcaaggacttttctgctatttactgctcttattgttaaggataataattaaggatcatatgaataattaatgaagatgctgatgactatgaataataaataattatcctgaggaga

SEQ ID NO: 737 - DNA, 3884 bp, Homo sapiens
  source 1..3884: mol_type = genomic DNA
  misc_feature 1..3884: note = cDNA of KCNH2 gene SNP c.3007G>T (p.Asp1003Tyr)
atgccggtgcggaggggccacgtcgcgccgcagaacaccttcctggacaccatcatccgcaagtttgagggccagagccgtaagttcatcatcgccaacgctcgggtggagaactgcgccgtcatctactgcaacgacggcttctgcgagctgtgcggctactcgcgggccgaggtgatgcagcgaccctgcacctgcgacttcctgcacgggccgcgcacgcagcgccgcgctgccgcgcagatcgcgcaggcactgctgggcgccgaggagcgcaaagtggaaatcgccttctaccggaaagatgggagctgcttcctatgtctggtggatgtggtgcccgtgaagaacgaggatggggctgtcatcatgttcatcctcaatttcgaggtggtgatggagaaggacatggtggggtccccggctcatgacaccaaccaccggggcccccccaccagctggctggccccaggccgcgccaagaccttccgcctgaagctgcccgcgctgctggcgctgacggcccgggagtcgtcggtgcggtcgggcggcgcgggcggcgcgggcgccccgggggccgtggtggtggacgtggacctgacgcccgcggcacccagcagcgagtcgctggccctggacgaagtgacagccatggacaaccacgtggcagggctcgggcccgcggaggagcggcgtgcgctggtgggtcccggctctccgccccgcagcgcgcccggccagctcccatcgccccgggcgcacagcctcaaccccgacgcctcgggctccagctgcagcctggcccggacgcgctcccgagaaagctgcgccagcgtgcgccgcgcctcgtcggccgacgacatcgaggccatgcgcgccggggtgctgcccccgccaccgcgccacgccagcaccggggccatgcacccactgcgcagcggcttgctcaactccacctcggactccgacctcgtgcgctaccgcaccattagcaagattccccaaatcaccctcaactttgtggacctcaagggcgaccccttcttggcttcgcccaccagtgaccgtgagatcatagcacctaagataaaggagcgaacccacaatgtcactgagaaggtcacccaggtcctgtccctgggcgccgacgtgctgcctgagtacaagctgcaggcaccgcgcatccaccgctggaccatcctgcattacagccccttcaaggccgtgtgggactggctcatcctgctgctggtcatctacacggctgtcttcacaccctactcggctgccttcctgctgaaggagacggaagaaggcccgcctgctaccgagtgtggctacgcctgccagccgctggctgtggtggacctcatcgtggacatcatgttcattgtggacatcctcatcaacttccgcaccacctacgtcaatgccaacgaggaggtggtcagccaccccggccgcatcgccgtccactacttcaagggctggttcctcatcgacatggtggccgccatccccttcgacctgctcatcttcggctctggctctgaggagctgatcgggctgctgaagactgcgcggctgctgcggctggtgcgcgtggcgcggaagctggatcgctactcagagtacggcgcggccgtgctgttcttgctcatgtgcacctttgcgctcatcgcgcactggctagcctgcatctggtacgccatcggcaacatggagcagccacacatggactcacgcatcggctggctgcacaacctgggcgaccagataggcaaaccctacaacagcagcggcctgggcggcccctccatcaaggacaagtatgtgacggcgctctacttcaccttcagcagcctcaccagtgtgggcttcggcaacgtctctcccaacaccaactcagagaagatcttctccatctgcgtcatgctcattggctccctcatgtatgctagcatcttcggcaacgtgtcggccatcatccagcggctgtactcgggcacagcccgctaccacacacagatgctgcgggtgcgggagttcatccgcttccaccagatccccaatcccctgcgccagcgcctcgaggagtacttccagcacgcctggtcctacaccaacggcatcgacatgaacgcggtgctgaagggcttccctgagtgcctgcaggctgacatctgcctgcacctgaaccgctcactgctgcagcactgcaaacccttccgaggggccaccaagggctgccttcgggccctggccatgaagttcaagaccacacatgcaccgccaggggacacactggtgcatgctggggacctgctcaccgccctgtacttcatctcccggggctccatcgagatcctgcggggcgacgtcgtcgtggccatcctggggaagaatgacatctttggggagcctctgaacctgtatgcaaggcctggcaagtcgaacggggatgtgcgggccctcacctactgtgacctacacaagatccatcgggacgacctgctggaggtgctggacatgtaccctgagttctccgaccacttctggtccagcctggagatcaccttcaacctgcgagataccaacatgatcccgggctcccccggcagtacggagttagagggtggcttcagtcggcaacgcaagcgcaagttgtccttccgcaggcgcacggacaaggacacggagcagccaggggaggtgtcggccttggggccgggccgggcgggggcagggccgagtagccggggccggccgggggggccgtggggggagagcccgtccagtggcccctccagccctgagagcagtgaggatgagggcccaggccgcagctccagccccctccgcctggtgcccttctccagccccaggccccccggagagccgccgggtggggagcccctgatggaggactgcgagaagagcagcgacacttgcaaccccctgtcaggcgccttctcaggagtgtccaacattttcagcttctgggggtacagtcggggccgccagtaccaggagctccctcgatgccccgcccccacccccagcctcctcaacatccccctctccagcccgggtcggcggccccggggcgacgtggagagcaggctggatgccctccagcgccagctcaacaggctggagacccggctgagtgcagacatggccactgtcctgcagctgctacagaggcagatgacgctggtcccgcccgcctacagtgctgtgaccaccccggggcctggccccacttccacatccccgctgttgcccgtcagccccctccccaccctcaccttggactcgctttctcaggtttcccagttcatggcgtgtgaggagctgcccccgggggccccagagcttccccaagaaggccccacacgacgcctctccctaccgggccagctgggggccctcacctcccagcccctgcacagacacggctcggacccgggcagttagtggggctgcccagtgtggacacgtggctcacccagggatcaaggcgctgctgggccgctccccttggaggccctgctcaggaggccctgaccgtggaaggggagaggaactcgaaagcacagctcctcccccagcccttgggaccatcttctcctgcagtcccctgggccccagtgagaggggcaggggcagggccggcagtaggtggggcctgtggtccccccactgccctgagggcattagctggtctaactgcccggaggcacccggccctgggccttaggcacctcaaggacttttctgctatttactgctcttattgttaaggataataattaaggatcatatgaataattaatgaagatgctgatgactatgaataataaataattatcctgaggaga

SEQ ID NO: 738 - DNA, 3884 bp, Homo sapiens
  source 1..3884: mol_type = genomic DNA
  misc_feature 1..3884: note = cDNA of KCNH2 gene SNP c.3013C>T (p.Arg1005Trp)
atgccggtgcggaggggccacgtcgcgccgcagaacaccttcctggacaccatcatccgcaagtttgagggccagagccgtaagttcatcatcgccaacgctcgggtggagaactgcgccgtcatctactgcaacgacggcttctgcgagctgtgcggctactcgcgggccgaggtgatgcagcgaccctgcacctgcgacttcctgcacgggccgcgcacgcagcgccgcgctgccgcgcagatcgcgcaggcactgctgggcgccgaggagcgcaaagtggaaatcgccttctaccggaaagatgggagctgcttcctatgtctggtggatgtggtgcccgtgaagaacgaggatggggctgtcatcatgttcatcctcaatttcgaggtggtgatggagaaggacatggtggggtccccggctcatgacaccaaccaccggggcccccccaccagctggctggccccaggccgcgccaagaccttccgcctgaagctgcccgcgctgctggcgctgacggcccgggagtcgtcggtgcggtcgggcggcgcgggcggcgcgggcgccccgggggccgtggtggtggacgtggacctgacgcccgcggcacccagcagcgagtcgctggccctggacgaagtgacagccatggacaaccacgtggcagggctcgggcccgcggaggagcggcgtgcgctggtgggtcccggctctccgccccgcagcgcgcccggccagctcccatcgccccgggcgcacagcctcaaccccgacgcctcgggctccagctgcagcctggcccggacgcgctcccgagaaagctgcgccagcgtgcgccgcgcctcgtcggccgacgacatcgaggccatgcgcgccggggtgctgcccccgccaccgcgccacgccagcaccggggccatgcacccactgcgcagcggcttgctcaactccacctcggactccgacctcgtgcgctaccgcaccattagcaagattccccaaatcaccctcaactttgtggacctcaagggcgaccccttcttggcttcgcccaccagtgaccgtgagatcatagcacctaagataaaggagcgaacccacaatgtcactgagaaggtcacccaggtcctgtccctgggcgccgacgtgctgcctgagtacaagctgcaggcaccgcgcatccaccgctggaccatcctgcattacagccccttcaaggccgtgtgggactggctcatcctgctgctggtcatctacacggctgtcttcacaccctactcggctgccttcctgctgaaggagacggaagaaggcccgcctgctaccgagtgtggctacgcctgccagccgctggctgtggtggacctcatcgtggacatcatgttcattgtggacatcctcatcaacttccgcaccacctacgtcaatgccaacgaggaggtggtcagccaccccggccgcatcgccgtccactacttcaagggctggttcctcatcgacatggtggccgccatccccttcgacctgctcatcttcggctctggctctgaggagctgatcgggctgctgaagactgcgcggctgctgcggctggtgcgcgtggcgcggaagctggatcgctactcagagtacggcgcggccgtgctgttcttgctcatgtgcacctttgcgctcatcgcgcactggctagcctgcatctggtacgccatcggcaacatggagcagccacacatggactcacgcatcggctggctgcacaacctgggcgaccagataggcaaaccctacaacagcagcggcctgggcggcccctccatcaaggacaagtatgtgacggcgctctacttcaccttcagcagcctcaccagtgtgggcttcggcaacgtctctcccaacaccaactcagagaagatcttctccatctgcgtcatgctcattggctccctcatgtatgctagcatcttcggcaacgtgtcggccatcatccagcggctgtactcgggcacagcccgctaccacacacagatgctgcgggtgcgggagttcatccgcttccaccagatccccaatcccctgcgccagcgcctcgaggagtacttccagcacgcctggtcctacaccaacggcatcgacatgaacgcggtgctgaagggcttccctgagtgcctgcaggctgacatctgcctgcacctgaaccgctcactgctgcagcactgcaaacccttccgaggggccaccaagggctgccttcgggccctggccatgaagttcaagaccacacatgcaccgccaggggacacactggtgcatgctggggacctgctcaccgccctgtacttcatctcccggggctccatcgagatcctgcggggcgacgtcgtcgtggccatcctggggaagaatgacatctttggggagcctctgaacctgtatgcaaggcctggcaagtcgaacggggatgtgcgggccctcacctactgtgacctacacaagatccatcgggacgacctgctggaggtgctggacatgtaccctgagttctccgaccacttctggtccagcctggagatcaccttcaacctgcgagataccaacatgatcccgggctcccccggcagtacggagttagagggtggcttcagtcggcaacgcaagcgcaagttgtccttccgcaggcgcacggacaaggacacggagcagccaggggaggtgtcggccttggggccgggccgggcgggggcagggccgagtagccggggccggccgggggggccgtggggggagagcccgtccagtggcccctccagccctgagagcagtgaggatgagggcccaggccgcagctccagccccctccgcctggtgcccttctccagccccaggccccccggagagccgccgggtggggagcccctgatggaggactgcgagaagagcagcgacacttgcaaccccctgtcaggcgccttctcaggagtgtccaacattttcagcttctggggggacagttggggccgccagtaccaggagctccctcgatgccccgcccccacccccagcctcctcaacatccccctctccagcccgggtcggcggccccggggcgacgtggagagcaggctggatgccctccagcgccagctcaacaggctggagacccggctgagtgcagacatggccactgtcctgcagctgctacagaggcagatgacgctggtcccgcccgcctacagtgctgtgaccaccccggggcctggccccacttccacatccccgctgttgcccgtcagccccctccccaccctcaccttggactcgctttctcaggtttcccagttcatggcgtgtgaggagctgcccccgggggccccagagcttccccaagaaggccccacacgacgcctctccctaccgggccagctgggggccctcacctcccagcccctgcacagacacggctcggacccgggcagttagtggggctgcccagtgtggacacgtggctcacccagggatcaaggcgctgctgggccgctccccttggaggccctgctcaggaggccctgaccgtggaaggggagaggaactcgaaagcacagctcctcccccagcccttgggaccatcttctcctgcagtcccctgggccccagtgagaggggcaggggcagggccggcagtaggtggggcctgtggtccccccactgccctgagggcattagctggtctaactgcccggaggcacccggccctgggccttaggcacctcaaggacttttctgctatttactgctcttattgttaaggataataattaaggatcatatgaataattaatgaagatgctgatgactatgaataataaataattatcctgaggaga

SEQ ID NO: 739 - DNA, 3884 bp, Homo sapiens
  source 1..3884: mol_type = genomic DNA
  misc_feature 1..3884: note = cDNA of KCNH2 gene SNP c.3014G>A (p.Arg1005Gln)
atgccggtgcggaggggccacgtcgcgccgcagaacaccttcctggacaccatcatccgcaagtttgagggccagagccgtaagttcatcatcgccaacgctcgggtggagaactgcgccgtcatctactgcaacgacggcttctgcgagctgtgcggctactcgcgggccgaggtgatgcagcgaccctgcacctgcgacttcctgcacgggccgcgcacgcagcgccgcgctgccgcgcagatcgcgcaggcactgctgggcgccgaggagcgcaaagtggaaatcgccttctaccggaaagatgggagctgcttcctatgtctggtggatgtggtgcccgtgaagaacgaggatggggctgtcatcatgttcatcctcaatttcgaggtggtgatggagaaggacatggtggggtccccggctcatgacaccaaccaccggggcccccccaccagctggctggccccaggccgcgccaagaccttccgcctgaagctgcccgcgctgctggcgctgacggcccgggagtcgtcggtgcggtcgggcggcgcgggcggcgcgggcgccccgggggccgtggtggtggacgtggacctgacgcccgcggcacccagcagcgagtcgctggccctggacgaagtgacagccatggacaaccacgtggcagggctcgggcccgcggaggagcggcgtgcgctggtgggtcccggctctccgccccgcagcgcgcccggccagctcccatcgccccgggcgcacagcctcaaccccgacgcctcgggctccagctgcagcctggcccggacgcgctcccgagaaagctgcgccagcgtgcgccgcgcctcgtcggccgacgacatcgaggccatgcgcgccggggtgctgcccccgccaccgcgccacgccagcaccggggccatgcacccactgcgcagcggcttgctcaactccacctcggactccgacctcgtgcgctaccgcaccattagcaagattccccaaatcaccctcaactttgtggacctcaagggcgaccccttcttggcttcgcccaccagtgaccgtgagatcatagcacctaagataaaggagcgaacccacaatgtcactgagaaggtcacccaggtcctgtccctgggcgccgacgtgctgcctgagtacaagctgcaggcaccgcgcatccaccgctggaccatcctgcattacagccccttcaaggccgtgtgggactggctcatcctgctgctggtcatctacacggctgtcttcacaccctactcggctgccttcctgctgaaggagacggaagaaggcccgcctgctaccgagtgtggctacgcctgccagccgctggctgtggtggacctcatcgtggacatcatgttcattgtggacatcctcatcaacttccgcaccacctacgtcaatgccaacgaggaggtggtcagccaccccggccgcatcgccgtccactacttcaagggctggttcctcatcgacatggtggccgccatccccttcgacctgctcatcttcggctctggctctgaggagctgatcgggctgctgaagactgcgcggctgctgcggctggtgcgcgtggcgcggaagctggatcgctactcagagtacggcgcggccgtgctgttcttgctcatgtgcacctttgcgctcatcgcgcactggctagcctgcatctggtacgccatcggcaacatggagcagccacacatggactcacgcatcggctggctgcacaacctgggcgaccagataggcaaaccctacaacagcagcggcctgggcggcccctccatcaaggacaagtatgtgacggcgctctacttcaccttcagcagcctcaccagtgtgggcttcggcaacgtctctcccaacaccaactcagagaagatcttctccatctgcgtcatgctcattggctccctcatgtatgctagcatcttcggcaacgtgtcggccatcatccagcggctgtactcgggcacagcccgctaccacacacagatgctgcgggtgcgggagttcatccgcttccaccagatccccaatcccctgcgccagcgcctcgaggagtacttccagcacgcctggtcctacaccaacggcatcgacatgaacgcggtgctgaagggcttccctgagtgcctgcaggctgacatctgcctgcacctgaaccgctcactgctgcagcactgcaaacccttccgaggggccaccaagggctgccttcgggccctggccatgaagttcaagaccacacatgcaccgccaggggacacactggtgcatgctggggacctgctcaccgccctgtacttcatctcccggggctccatcgagatcctgcggggcgacgtcgtcgtggccatcctggggaagaatgacatctttggggagcctctgaacctgtatgcaaggcctggcaagtcgaacggggatgtgcgggccctcacctactgtgacctacacaagatccatcgggacgacctgctggaggtgctggacatgtaccctgagttctccgaccacttctggtccagcctggagatcaccttcaacctgcgagataccaacatgatcccgggctcccccggcagtacggagttagagggtggcttcagtcggcaacgcaagcgcaagttgtccttccgcaggcgcacggacaaggacacggagcagccaggggaggtgtcggccttggggccgggccgggcgggggcagggccgagtagccggggccggccgggggggccgtggggggagagcccgtccagtggcccctccagccctgagagcagtgaggatgagggcccaggccgcagctccagccccctccgcctggtgcccttctccagccccaggccccccggagagccgccgggtggggagcccctgatggaggactgcgagaagagcagcgacacttgcaaccccctgtcaggcgccttctcaggagtgtccaacattttcagcttctggggggacagtcagggccgccagtaccaggagctccctcgatgccccgcccccacccccagcctcctcaacatccccctctccagcccgggtcggcggccccggggcgacgtggagagcaggctggatgccctccagcgccagctcaacaggctggagacccggctgagtgcagacatggccactgtcctgcagctgctacagaggcagatgacgctggtcccgcccgcctacagtgctgtgaccaccccggggcctggccccacttccacatccccgctgttgcccgtcagccccctccccaccctcaccttggactcgctttctcaggtttcccagttcatggcgtgtgaggagctgcccccgggggccccagagcttccccaagaaggccccacacgacgcctctccctaccgggccagctgggggccctcacctcccagcccctgcacagacacggctcggacccgggcagttagtggggctgcccagtgtggacacgtggctcacccagggatcaaggcgctgctgggccgctccccttggaggccctgctcaggaggccctgaccgtggaaggggagaggaactcgaaagcacagctcctcccccagcccttgggaccatcttctcctgcagtcccctgggccccagtgagaggggcaggggcagggccggcagtaggtggggcctgtggtccccccactgccctgagggcattagctggtctaactgcccggaggcacccggccctgggccttaggcacctcaaggacttttctgctatttactgctcttattgttaaggataataattaaggatcatatgaataattaatgaagatgctgatgactatgaataataaataattatcctgaggaga

SEQ ID NO: 740 - DNA, 3884 bp, Homo sapiens
  source 1..3884: mol_type = genomic DNA
  misc_feature 1..3884: note = cDNA of KCNH2 gene SNP c.3019C>T (p.Arg1007Cys)
atgccggtgcggaggggccacgtcgcgccgcagaacaccttcctggacaccatcatccgcaagtttgagggccagagccgtaagttcatcatcgccaacgctcgggtggagaactgcgccgtcatctactgcaacgacggcttctgcgagctgtgcggctactcgcgggccgaggtgatgcagcgaccctgcacctgcgacttcctgcacgggccgcgcacgcagcgccgcgctgccgcgcagatcgcgcaggcactgctgggcgccgaggagcgcaaagtggaaatcgccttctaccggaaagatgggagctgcttcctatgtctggtggatgtggtgcccgtgaagaacgaggatggggctgtcatcatgttcatcctcaatttcgaggtggtgatggagaaggacatggtggggtccccggctcatgacaccaaccaccggggcccccccaccagctggctggccccaggccgcgccaagaccttccgcctgaagctgcccgcgctgctggcgctgacggcccgggagtcgtcggtgcggtcgggcggcgcgggcggcgcgggcgccccgggggccgtggtggtggacgtggacctgacgcccgcggcacccagcagcgagtcgctggccctggacgaagtgacagccatggacaaccacgtggcagggctcgggcccgcggaggagcggcgtgcgctggtgggtcccggctctccgccccgcagcgcgcccggccagctcccatcgccccgggcgcacagcctcaaccccgacgcctcgggctccagctgcagcctggcccggacgcgctcccgagaaagctgcgccagcgtgcgccgcgcctcgtcggccgacgacatcgaggccatgcgcgccggggtgctgcccccgccaccgcgccacgccagcaccggggccatgcacccactgcgcagcggcttgctcaactccacctcggactccgacctcgtgcgctaccgcaccattagcaagattccccaaatcaccctcaactttgtggacctcaagggcgaccccttcttggcttcgcccaccagtgaccgtgagatcatagcacctaagataaaggagcgaacccacaatgtcactgagaaggtcacccaggtcctgtccctgggcgccgacgtgctgcctgagtacaagctgcaggcaccgcgcatccaccgctggaccatcctgcattacagccccttcaaggccgtgtgggactggctcatcctgctgctggtcatctacacggctgtcttcacaccctactcggctgccttcctgctgaaggagacggaagaaggcccgcctgctaccgagtgtggctacgcctgccagccgctggctgtggtggacctcatcgtggacatcatgttcattgtggacatcctcatcaacttccgcaccacctacgtcaatgccaacgaggaggtggtcagccaccccggccgcatcgccgtccactacttcaagggctggttcctcatcgacatggtggccgccatccccttcgacctgctcatcttcggctctggctctgaggagctgatcgggctgctgaagactgcgcggctgctgcggctggtgcgcgtggcgcggaagctggatcgctactcagagtacggcgcggccgtgctgttcttgctcatgtgcacctttgcgctcatcgcgcactggctagcctgcatctggtacgccatcggcaacatggagcagccacacatggactcacgcatcggctggctgcacaacctgggcgaccagataggcaaaccctacaacagcagcggcctgggcggcccctccatcaaggacaagtatgtgacggcgctctacttcaccttcagcagcctcaccagtgtgggcttcggcaacgtctctcccaacaccaactcagagaagatcttctccatctgcgtcatgctcattggctccctcatgtatgctagcatcttcggcaacgtgtcggccatcatccagcggctgtactcgggcacagcccgctaccacacacagatgctgcgggtgcgggagttcatccgcttccaccagatccccaatcccctgcgccagcgcctcgaggagtacttccagcacgcctggtcctacaccaacggcatcgacatgaacgcggtgctgaagggcttccctgagtgcctgcaggctgacatctgcctgcacctgaaccgctcactgctgcagcactgcaaacccttccgaggggccaccaagggctgccttcgggccctggccatgaagttcaagaccacacatgcaccgccaggggacacactggtgcatgctggggacctgctcaccgccctgtacttcatctcccggggctccatcgagatcctgcggggcgacgtcgtcgtggccatcctggggaagaatgacatctttggggagcctctgaacctgtatgcaaggcctggcaagtcgaacggggatgtgcgggccctcacctactgtgacctacacaagatccatcgggacgacctgctggaggtgctggacatgtaccctgagttctccgaccacttctggtccagcctggagatcaccttcaacctgcgagataccaacatgatcccgggctcccccggcagtacggagttagagggtggcttcagtcggcaacgcaagcgcaagttgtccttccgcaggcgcacggacaaggacacggagcagccaggggaggtgtcggccttggggccgggccgggcgggggcagggccgagtagccggggccggccgggggggccgtggggggagagcccgtccagtggcccctccagccctgagagcagtgaggatgagggcccaggccgcagctccagccccctccgcctggtgcccttctccagccccaggccccccggagagccgccgggtggggagcccctgatggaggactgcgagaagagcagcgacacttgcaaccccctgtcaggcgccttctcaggagtgtccaacattttcagcttctggggggacagtcggggctgccagtaccaggagctccctcgatgccccgcccccacccccagcctcctcaacatccccctctccagcccgggtcggcggccccggggcgacgtggagagcaggctggatgccctccagcgccagctcaacaggctggagacccggctgagtgcagacatggccactgtcctgcagctgctacagaggcagatgacgctggtcccgcccgcctacagtgctgtgaccaccccggggcctggccccacttccacatccccgctgttgcccgtcagccccctccccaccctcaccttggactcgctttctcaggtttcccagttcatggcgtgtgaggagctgcccccgggggccccagagcttccccaagaaggccccacacgacgcctctccctaccgggccagctgggggccctcacctcccagcccctgcacagacacggctcggacccgggcagttagtggggctgcccagtgtggacacgtggctcacccagggatcaaggcgctgctgggccgctccccttggaggccctgctcaggaggccctgaccgtggaaggggagaggaactcgaaagcacagctcctcccccagcccttgggaccatcttctcctgcagtcccctgggccccagtgagaggggcaggggcagggccggcagtaggtggggcctgtggtccccccactgccctgagggcattagctggtctaactgcccggaggcacccggccctgggccttaggcacctcaaggacttttctgctatttactgctcttattgttaaggataataattaaggatcatatgaataattaatgaagatgctgatgactatgaataataaataattatcctgaggaga

SEQ ID NO: 741 - DNA, 3884 bp, Homo sapiens
  source 1..3884: mol_type = genomic DNA
  misc_feature 1..3884: note = cDNA of KCNH2 gene SNP c.301A>G (p.Lys101Glu)
atgccggtgcggaggggccacgtcgcgccgcagaacaccttcctggacaccatcatccgcaagtttgagggccagagccgtaagttcatcatcgccaacgctcgggtggagaactgcgccgtcatctactgcaacgacggcttctgcgagctgtgcggctactcgcgggccgaggtgatgcagcgaccctgcacctgcgacttcctgcacgggccgcgcacgcagcgccgcgctgccgcgcagatcgcgcaggcactgctgggcgccgaggagcgcaaagtggaaatcgccttctaccgggaagatgggagctgcttcctatgtctggtggatgtggtgcccgtgaagaacgaggatggggctgtcatcatgttcatcctcaatttcgaggtggtgatggagaaggacatggtggggtccccggctcatgacaccaaccaccggggcccccccaccagctggctggccccaggccgcgccaagaccttccgcctgaagctgcccgcgctgctggcgctgacggcccgggagtcgtcggtgcggtcgggcggcgcgggcggcgcgggcgccccgggggccgtggtggtggacgtggacctgacgcccgcggcacccagcagcgagtcgctggccctggacgaagtgacagccatggacaaccacgtggcagggctcgggcccgcggaggagcggcgtgcgctggtgggtcccggctctccgccccgcagcgcgcccggccagctcccatcgccccgggcgcacagcctcaaccccgacgcctcgggctccagctgcagcctggcccggacgcgctcccgagaaagctgcgccagcgtgcgccgcgcctcgtcggccgacgacatcgaggccatgcgcgccggggtgctgcccccgccaccgcgccacgccagcaccggggccatgcacccactgcgcagcggcttgctcaactccacctcggactccgacctcgtgcgctaccgcaccattagcaagattccccaaatcaccctcaactttgtggacctcaagggcgaccccttcttggcttcgcccaccagtgaccgtgagatcatagcacctaagataaaggagcgaacccacaatgtcactgagaaggtcacccaggtcctgtccctgggcgccgacgtgctgcctgagtacaagctgcaggcaccgcgcatccaccgctggaccatcctgcattacagccccttcaaggccgtgtgggactggctcatcctgctgctggtcatctacacggctgtcttcacaccctactcggctgccttcctgctgaaggagacggaagaaggcccgcctgctaccgagtgtggctacgcctgccagccgctggctgtggtggacctcatcgtggacatcatgttcattgtggacatcctcatcaacttccgcaccacctacgtcaatgccaacgaggaggtggtcagccaccccggccgcatcgccgtccactacttcaagggctggttcctcatcgacatggtggccgccatccccttcgacctgctcatcttcggctctggctctgaggagctgatcgggctgctgaagactgcgcggctgctgcggctggtgcgcgtggcgcggaagctggatcgctactcagagtacggcgcggccgtgctgttcttgctcatgtgcacctttgcgctcatcgcgcactggctagcctgcatctggtacgccatcggcaacatggagcagccacacatggactcacgcatcggctggctgcacaacctgggcgaccagataggcaaaccctacaacagcagcggcctgggcggcccctccatcaaggacaagtatgtgacggcgctctacttcaccttcagcagcctcaccagtgtgggcttcggcaacgtctctcccaacaccaactcagagaagatcttctccatctgcgtcatgctcattggctccctcatgtatgctagcatcttcggcaacgtgtcggccatcatccagcggctgtactcgggcacagcccgctaccacacacagatgctgcgggtgcgggagttcatccgcttccaccagatccccaatcccctgcgccagcgcctcgaggagtacttccagcacgcctggtcctacaccaacggcatcgacatgaacgcggtgctgaagggcttccctgagtgcctgcaggctgacatctgcctgcacctgaaccgctcactgctgcagcactgcaaacccttccgaggggccaccaagggctgccttcgggccctggccatgaagttcaagaccacacatgcaccgccaggggacacactggtgcatgctggggacctgctcaccgccctgtacttcatctcccggggctccatcgagatcctgcggggcgacgtcgtcgtggccatcctggggaagaatgacatctttggggagcctctgaacctgtatgcaaggcctggcaagtcgaacggggatgtgcgggccctcacctactgtgacctacacaagatccatcgggacgacctgctggaggtgctggacatgtaccctgagttctccgaccacttctggtccagcctggagatcaccttcaacctgcgagataccaacatgatcccgggctcccccggcagtacggagttagagggtggcttcagtcggcaacgcaagcgcaagttgtccttccgcaggcgcacggacaaggacacggagcagccaggggaggtgtcggccttggggccgggccgggcgggggcagggccgagtagccggggccggccgggggggccgtggggggagagcccgtccagtggcccctccagccctgagagcagtgaggatgagggcccaggccgcagctccagccccctccgcctggtgcccttctccagccccaggccccccggagagccgccgggtggggagcccctgatggaggactgcgagaagagcagcgacacttgcaaccccctgtcaggcgccttctcaggagtgtccaacattttcagcttctggggggacagtcggggccgccagtaccaggagctccctcgatgccccgcccccacccccagcctcctcaacatccccctctccagcccgggtcggcggccccggggcgacgtggagagcaggctggatgccctccagcgccagctcaacaggctggagacccggctgagtgcagacatggccactgtcctgcagctgctacagaggcagatgacgctggtcccgcccgcctacagtgctgtgaccaccccggggcctggccccacttccacatccccgctgttgcccgtcagccccctccccaccctcaccttggactcgctttctcaggtttcccagttcatggcgtgtgaggagctgcccccgggggccccagagcttccccaagaaggccccacacgacgcctctccctaccgggccagctgggggccctcacctcccagcccctgcacagacacggctcggacccgggcagttagtggggctgcccagtgtggacacgtggctcacccagggatcaaggcgctgctgggccgctccccttggaggccctgctcaggaggccctgaccgtggaaggggagaggaactcgaaagcacagctcctcccccagcccttgggaccatcttctcctgcagtcccctgggccccagtgagaggggcaggggcagggccggcagtaggtggggcctgtggtccccccactgccctgagggcattagctggtctaactgcccggaggcacccggccctgggccttaggcacctcaaggacttttctgctatttactgctcttattgttaaggataataattaaggatcatatgaataattaatgaagatgctgatgactatgaataataaataattatcctgaggaga

SEQ ID NO: 742 - DNA, 3884 bp, Homo sapiens
  source 1..3884: mol_type = genomic DNA
  misc_feature 1..3884: note = cDNA of KCNH2 gene SNP c.301A>T (p.Lys101Ter)
atgccggtgcggaggggccacgtcgcgccgcagaacaccttcctggacaccatcatccgcaagtttgagggccagagccgtaagttcatcatcgccaacgctcgggtggagaactgcgccgtcatctactgcaacgacggcttctgcgagctgtgcggctactcgcgggccgaggtgatgcagcgaccctgcacctgcgacttcctgcacgggccgcgcacgcagcgccgcgctgccgcgcagatcgcgcaggcactgctgggcgccgaggagcgcaaagtggaaatcgccttctaccggtaagatgggagctgcttcctatgtctggtggatgtggtgcccgtgaagaacgaggatggggctgtcatcatgttcatcctcaatttcgaggtggtgatggagaaggacatggtggggtccccggctcatgacaccaaccaccggggcccccccaccagctggctggccccaggccgcgccaagaccttccgcctgaagctgcccgcgctgctggcgctgacggcccgggagtcgtcggtgcggtcgggcggcgcgggcggcgcgggcgccccgggggccgtggtggtggacgtggacctgacgcccgcggcacccagcagcgagtcgctggccctggacgaagtgacagccatggacaaccacgtggcagggctcgggcccgcggaggagcggcgtgcgctggtgggtcccggctctccgccccgcagcgcgcccggccagctcccatcgccccgggcgcacagcctcaaccccgacgcctcgggctccagctgcagcctggcccggacgcgctcccgagaaagctgcgccagcgtgcgccgcgcctcgtcggccgacgacatcgaggccatgcgcgccggggtgctgcccccgccaccgcgccacgccagcaccggggccatgcacccactgcgcagcggcttgctcaactccacctcggactccgacctcgtgcgctaccgcaccattagcaagattccccaaatcaccctcaactttgtggacctcaagggcgaccccttcttggcttcgcccaccagtgaccgtgagatcatagcacctaagataaaggagcgaacccacaatgtcactgagaaggtcacccaggtcctgtccctgggcgccgacgtgctgcctgagtacaagctgcaggcaccgcgcatccaccgctggaccatcctgcattacagccccttcaaggccgtgtgggactggctcatcctgctgctggtcatctacacggctgtcttcacaccctactcggctgccttcctgctgaaggagacggaagaaggcccgcctgctaccgagtgtggctacgcctgccagccgctggctgtggtggacctcatcgtggacatcatgttcattgtggacatcctcatcaacttccgcaccacctacgtcaatgccaacgaggaggtggtcagccaccccggccgcatcgccgtccactacttcaagggctggttcctcatcgacatggtggccgccatccccttcgacctgctcatcttcggctctggctctgaggagctgatcgggctgctgaagactgcgcggctgctgcggctggtgcgcgtggcgcggaagctggatcgctactcagagtacggcgcggccgtgctgttcttgctcatgtgcacctttgcgctcatcgcgcactggctagcctgcatctggtacgccatcggcaacatggagcagccacacatggactcacgcatcggctggctgcacaacctgggcgaccagataggcaaaccctacaacagcagcggcctgggcggcccctccatcaaggacaagtatgtgacggcgctctacttcaccttcagcagcctcaccagtgtgggcttcggcaacgtctctcccaacaccaactcagagaagatcttctccatctgcgtcatgctcattggctccctcatgtatgctagcatcttcggcaacgtgtcggccatcatccagcggctgtactcgggcacagcccgctaccacacacagatgctgcgggtgcgggagttcatccgcttccaccagatccccaatcccctgcgccagcgcctcgaggagtacttccagcacgcctggtcctacaccaacggcatcgacatgaacgcggtgctgaagggcttccctgagtgcctgcaggctgacatctgcctgcacctgaaccgctcactgctgcagcactgcaaacccttccgaggggccaccaagggctgccttcgggccctggccatgaagttcaagaccacacatgcaccgccaggggacacactggtgcatgctggggacctgctcaccgccctgtacttcatctcccggggctccatcgagatcctgcggggcgacgtcgtcgtggccatcctggggaagaatgacatctttggggagcctctgaacctgtatgcaaggcctggcaagtcgaacggggatgtgcgggccctcacctactgtgacctacacaagatccatcgggacgacctgctggaggtgctggacatgtaccctgagttctccgaccacttctggtccagcctggagatcaccttcaacctgcgagataccaacatgatcccgggctcccccggcagtacggagttagagggtggcttcagtcggcaacgcaagcgcaagttgtccttccgcaggcgcacggacaaggacacggagcagccaggggaggtgtcggccttggggccgggccgggcgggggcagggccgagtagccggggccggccgggggggccgtggggggagagcccgtccagtggcccctccagccctgagagcagtgaggatgagggcccaggccgcagctccagccccctccgcctggtgcccttctccagccccaggccccccggagagccgccgggtggggagcccctgatggaggactgcgagaagagcagcgacacttgcaaccccctgtcaggcgccttctcaggagtgtccaacattttcagcttctggggggacagtcggggccgccagtaccaggagctccctcgatgccccgcccccacccccagcctcctcaacatccccctctccagcccgggtcggcggccccggggcgacgtggagagcaggctggatgccctccagcgccagctcaacaggctggagacccggctgagtgcagacatggccactgtcctgcagctgctacagaggcagatgacgctggtcccgcccgcctacagtgctgtgaccaccccggggcctggccccacttccacatccccgctgttgcccgtcagccccctccccaccctcaccttggactcgctttctcaggtttcccagttcatggcgtgtgaggagctgcccccgggggccccagagcttccccaagaaggccccacacgacgcctctccctaccgggccagctgggggccctcacctcccagcccctgcacagacacggctcggacccgggcagttagtggggctgcccagtgtggacacgtggctcacccagggatcaaggcgctgctgggccgctccccttggaggccctgctcaggaggccctgaccgtggaaggggagaggaactcgaaagcacagctcctcccccagcccttgggaccatcttctcctgcagtcccctgggccccagtgagaggggcaggggcagggccggcagtaggtggggcctgtggtccccccactgccctgagggcattagctggtctaactgcccggaggcacccggccctgggccttaggcacctcaaggacttttctgctatttactgctcttattgttaaggataataattaaggatcatatgaataattaatgaagatgctgatgactatgaataataaataattatcctgaggaga

SEQ ID NO: 743 - DNA, 3884 bp, Homo sapiens
  source 1..3884: mol_type = genomic DNA
  misc_feature 1..3884: note = cDNA of KCNH2 gene SNP c.3020G>A (p.Arg1007His)
atgccggtgcggaggggccacgtcgcgccgcagaacaccttcctggacaccatcatccgcaagtttgagggccagagccgtaagttcatcatcgccaacgctcgggtggagaactgcgccgtcatctactgcaacgacggcttctgcgagctgtgcggctactcgcgggccgaggtgatgcagcgaccctgcacctgcgacttcctgcacgggccgcgcacgcagcgccgcgctgccgcgcagatcgcgcaggcactgctgggcgccgaggagcgcaaagtggaaatcgccttctaccggaaagatgggagctgcttcctatgtctggtggatgtggtgcccgtgaagaacgaggatggggctgtcatcatgttcatcctcaatttcgaggtggtgatggagaaggacatggtggggtccccggctcatgacaccaaccaccggggcccccccaccagctggctggccccaggccgcgccaagaccttccgcctgaagctgcccgcgctgctggcgctgacggcccgggagtcgtcggtgcggtcgggcggcgcgggcggcgcgggcgccccgggggccgtggtggtggacgtggacctgacgcccgcggcacccagcagcgagtcgctggccctggacgaagtgacagccatggacaaccacgtggcagggctcgggcccgcggaggagcggcgtgcgctggtgggtcccggctctccgccccgcagcgcgcccggccagctcccatcgccccgggcgcacagcctcaaccccgacgcctcgggctccagctgcagcctggcccggacgcgctcccgagaaagctgcgccagcgtgcgccgcgcctcgtcggccgacgacatcgaggccatgcgcgccggggtgctgcccccgccaccgcgccacgccagcaccggggccatgcacccactgcgcagcggcttgctcaactccacctcggactccgacctcgtgcgctaccgcaccattagcaagattccccaaatcaccctcaactttgtggacctcaagggcgaccccttcttggcttcgcccaccagtgaccgtgagatcatagcacctaagataaaggagcgaacccacaatgtcactgagaaggtcacccaggtcctgtccctgggcgccgacgtgctgcctgagtacaagctgcaggcaccgcgcatccaccgctggaccatcctgcattacagccccttcaaggccgtgtgggactggctcatcctgctgctggtcatctacacggctgtcttcacaccctactcggctgccttcctgctgaaggagacggaagaaggcccgcctgctaccgagtgtggctacgcctgccagccgctggctgtggtggacctcatcgtggacatcatgttcattgtggacatcctcatcaacttccgcaccacctacgtcaatgccaacgaggaggtggtcagccaccccggccgcatcgccgtccactacttcaagggctggttcctcatcgacatggtggccgccatccccttcgacctgctcatcttcggctctggctctgaggagctgatcgggctgctgaagactgcgcggctgctgcggctggtgcgcgtggcgcggaagctggatcgctactcagagtacggcgcggccgtgctgttcttgctcatgtgcacctttgcgctcatcgcgcactggctagcctgcatctggtacgccatcggcaacatggagcagccacacatggactcacgcatcggctggctgcacaacctgggcgaccagataggcaaaccctacaacagcagcggcctgggcggcccctccatcaaggacaagtatgtgacggcgctctacttcaccttcagcagcctcaccagtgtgggcttcggcaacgtctctcccaacaccaactcagagaagatcttctccatctgcgtcatgctcattggctccctcatgtatgctagcatcttcggcaacgtgtcggccatcatccagcggctgtactcgggcacagcccgctaccacacacagatgctgcgggtgcgggagttcatccgcttccaccagatccccaatcccctgcgccagcgcctcgaggagtacttccagcacgcctggtcctacaccaacggcatcgacatgaacgcggtgctgaagggcttccctgagtgcctgcaggctgacatctgcctgcacctgaaccgctcactgctgcagcactgcaaacccttccgaggggccaccaagggctgccttcgggccctggccatgaagttcaagaccacacatgcaccgccaggggacacactggtgcatgctggggacctgctcaccgccctgtacttcatctcccggggctccatcgagatcctgcggggcgacgtcgtcgtggccatcctggggaagaatgacatctttggggagcctctgaacctgtatgcaaggcctggcaagtcgaacggggatgtgcgggccctcacctactgtgacctacacaagatccatcgggacgacctgctggaggtgctggacatgtaccctgagttctccgaccacttctggtccagcctggagatcaccttcaacctgcgagataccaacatgatcccgggctcccccggcagtacggagttagagggtggcttcagtcggcaacgcaagcgcaagttgtccttccgcaggcgcacggacaaggacacggagcagccaggggaggtgtcggccttggggccgggccgggcgggggcagggccgagtagccggggccggccgggggggccgtggggggagagcccgtccagtggcccctccagccctgagagcagtgaggatgagggcccaggccgcagctccagccccctccgcctggtgcccttctccagccccaggccccccggagagccgccgggtggggagcccctgatggaggactgcgagaagagcagcgacacttgcaaccccctgtcaggcgccttctcaggagtgtccaacattttcagcttctggggggacagtcggggccaccagtaccaggagctccctcgatgccccgcccccacccccagcctcctcaacatccccctctccagcccgggtcggcggccccggggcgacgtggagagcaggctggatgccctccagcgccagctcaacaggctggagacccggctgagtgcagacatggccactgtcctgcagctgctacagaggcagatgacgctggtcccgcccgcctacagtgctgtgaccaccccggggcctggccccacttccacatccccgctgttgcccgtcagccccctccccaccctcaccttggactcgctttctcaggtttcccagttcatggcgtgtgaggagctgcccccgggggccccagagcttccccaagaaggccccacacgacgcctctccctaccgggccagctgggggccctcacctcccagcccctgcacagacacggctcggacccgggcagttagtggggctgcccagtgtggacacgtggctcacccagggatcaaggcgctgctgggccgctccccttggaggccctgctcaggaggccctgaccgtggaaggggagaggaactcgaaagcacagctcctcccccagcccttgggaccatcttctcctgcagtcccctgggccccagtgagaggggcaggggcagggccggcagtaggtggggcctgtggtccccccactgccctgagggcattagctggtctaactgcccggaggcacccggccctgggccttaggcacctcaaggacttttctgctatttactgctcttattgttaaggataataattaaggatcatatgaataattaatgaagatgctgatgactatgaataataaataattatcctgaggaga

SEQ ID NO: 744 - DNA, 3884 bp, Homo sapiens
  source 1..3884: mol_type = genomic DNA
  misc_feature 1..3884: note = cDNA of KCNH2 gene SNP c.3027C>G (p.Tyr1009Ter)
atgccggtgcggaggggccacgtcgcgccgcagaacaccttcctggacaccatcatccgcaagtttgagggccagagccgtaagttcatcatcgccaacgctcgggtggagaactgcgccgtcatctactgcaacgacggcttctgcgagctgtgcggctactcgcgggccgaggtgatgcagcgaccctgcacctgcgacttcctgcacgggccgcgcacgcagcgccgcgctgccgcgcagatcgcgcaggcactgctgggcgccgaggagcgcaaagtggaaatcgccttctaccggaaagatgggagctgcttcctatgtctggtggatgtggtgcccgtgaagaacgaggatggggctgtcatcatgttcatcctcaatttcgaggtggtgatggagaaggacatggtggggtccccggctcatgacaccaaccaccggggcccccccaccagctggctggccccaggccgcgccaagaccttccgcctgaagctgcccgcgctgctggcgctgacggcccgggagtcgtcggtgcggtcgggcggcgcgggcggcgcgggcgccccgggggccgtggtggtggacgtggacctgacgcccgcggcacccagcagcgagtcgctggccctggacgaagtgacagccatggacaaccacgtggcagggctcgggcccgcggaggagcggcgtgcgctggtgggtcccggctctccgccccgcagcgcgcccggccagctcccatcgccccgggcgcacagcctcaaccccgacgcctcgggctccagctgcagcctggcccggacgcgctcccgagaaagctgcgccagcgtgcgccgcgcctcgtcggccgacgacatcgaggccatgcgcgccggggtgctgcccccgccaccgcgccacgccagcaccggggccatgcacccactgcgcagcggcttgctcaactccacctcggactccgacctcgtgcgctaccgcaccattagcaagattccccaaatcaccctcaactttgtggacctcaagggcgaccccttcttggcttcgcccaccagtgaccgtgagatcatagcacctaagataaaggagcgaacccacaatgtcactgagaaggtcacccaggtcctgtccctgggcgccgacgtgctgcctgagtacaagctgcaggcaccgcgcatccaccgctggaccatcctgcattacagccccttcaaggccgtgtgggactggctcatcctgctgctggtcatctacacggctgtcttcacaccctactcggctgccttcctgctgaaggagacggaagaaggcccgcctgctaccgagtgtggctacgcctgccagccgctggctgtggtggacctcatcgtggacatcatgttcattgtggacatcctcatcaacttccgcaccacctacgtcaatgccaacgaggaggtggtcagccaccccggccgcatcgccgtccactacttcaagggctggttcctcatcgacatggtggccgccatccccttcgacctgctcatcttcggctctggctctgaggagctgatcgggctgctgaagactgcgcggctgctgcggctggtgcgcgtggcgcggaagctggatcgctactcagagtacggcgcggccgtgctgttcttgctcatgtgcacctttgcgctcatcgcgcactggctagcctgcatctggtacgccatcggcaacatggagcagccacacatggactcacgcatcggctggctgcacaacctgggcgaccagataggcaaaccctacaacagcagcggcctgggcggcccctccatcaaggacaagtatgtgacggcgctctacttcaccttcagcagcctcaccagtgtgggcttcggcaacgtctctcccaacaccaactcagagaagatcttctccatctgcgtcatgctcattggctccctcatgtatgctagcatcttcggcaacgtgtcggccatcatccagcggctgtactcgggcacagcccgctaccacacacagatgctgcgggtgcgggagttcatccgcttccaccagatccccaatcccctgcgccagcgcctcgaggagtacttccagcacgcctggtcctacaccaacggcatcgacatgaacgcggtgctgaagggcttccctgagtgcctgcaggctgacatctgcctgcacctgaaccgctcactgctgcagcactgcaaacccttccgaggggccaccaagggctgccttcgggccctggccatgaagttcaagaccacacatgcaccgccaggggacacactggtgcatgctggggacctgctcaccgccctgtacttcatctcccggggctccatcgagatcctgcggggcgacgtcgtcgtggccatcctggggaagaatgacatctttggggagcctctgaacctgtatgcaaggcctggcaagtcgaacggggatgtgcgggccctcacctactgtgacctacacaagatccatcgggacgacctgctggaggtgctggacatgtaccctgagttctccgaccacttctggtccagcctggagatcaccttcaacctgcgagataccaacatgatcccgggctcccccggcagtacggagttagagggtggcttcagtcggcaacgcaagcgcaagttgtccttccgcaggcgcacggacaaggacacggagcagccaggggaggtgtcggccttggggccgggccgggcgggggcagggccgagtagccggggccggccgggggggccgtggggggagagcccgtccagtggcccctccagccctgagagcagtgaggatgagggcccaggccgcagctccagccccctccgcctggtgcccttctccagccccaggccccccggagagccgccgggtggggagcccctgatggaggactgcgagaagagcagcgacacttgcaaccccctgtcaggcgccttctcaggagtgtccaacattttcagcttctggggggacagtcggggccgccagtagcaggagctccctcgatgccccgcccccacccccagcctcctcaacatccccctctccagcccgggtcggcggccccggggcgacgtggagagcaggctggatgccctccagcgccagctcaacaggctggagacccggctgagtgcagacatggccactgtcctgcagctgctacagaggcagatgacgctggtcccgcccgcctacagtgctgtgaccaccccggggcctggccccacttccacatccccgctgttgcccgtcagccccctccccaccctcaccttggactcgctttctcaggtttcccagttcatggcgtgtgaggagctgcccccgggggccccagagcttccccaagaaggccccacacgacgcctctccctaccgggccagctgggggccctcacctcccagcccctgcacagacacggctcggacccgggcagttagtggggctgcccagtgtggacacgtggctcacccagggatcaaggcgctgctgggccgctccccttggaggccctgctcaggaggccctgaccgtggaaggggagaggaactcgaaagcacagctcctcccccagcccttgggaccatcttctcctgcagtcccctgggccccagtgagaggggcaggggcagggccggcagtaggtggggcctgtggtccccccactgccctgagggcattagctggtctaactgcccggaggcacccggccctgggccttaggcacctcaaggacttttctgctatttactgctcttattgttaaggataataattaaggatcatatgaataattaatgaagatgctgatgactatgaataataaataattatcctgaggaga

SEQ ID NO: 745 - DNA, 3884 bp, Homo sapiens
  source 1..3884: mol_type = genomic DNA
  misc_feature 1..3884: note = cDNA of KCNH2 gene SNP c.302A>G (p.Lys101Arg)
atgccggtgcggaggggccacgtcgcgccgcagaacaccttcctggacaccatcatccgcaagtttgagggccagagccgtaagttcatcatcgccaacgctcgggtggagaactgcgccgtcatctactgcaacgacggcttctgcgagctgtgcggctactcgcgggccgaggtgatgcagcgaccctgcacctgcgacttcctgcacgggccgcgcacgcagcgccgcgctgccgcgcagatcgcgcaggcactgctgggcgccgaggagcgcaaagtggaaatcgccttctaccggagagatgggagctgcttcctatgtctggtggatgtggtgcccgtgaagaacgaggatggggctgtcatcatgttcatcctcaatttcgaggtggtgatggagaaggacatggtggggtccccggctcatgacaccaaccaccggggcccccccaccagctggctggccccaggccgcgccaagaccttccgcctgaagctgcccgcgctgctggcgctgacggcccgggagtcgtcggtgcggtcgggcggcgcgggcggcgcgggcgccccgggggccgtggtggtggacgtggacctgacgcccgcggcacccagcagcgagtcgctggccctggacgaagtgacagccatggacaaccacgtggcagggctcgggcccgcggaggagcggcgtgcgctggtgggtcccggctctccgccccgcagcgcgcccggccagctcccatcgccccgggcgcacagcctcaaccccgacgcctcgggctccagctgcagcctggcccggacgcgctcccgagaaagctgcgccagcgtgcgccgcgcctcgtcggccgacgacatcgaggccatgcgcgccggggtgctgcccccgccaccgcgccacgccagcaccggggccatgcacccactgcgcagcggcttgctcaactccacctcggactccgacctcgtgcgctaccgcaccattagcaagattccccaaatcaccctcaactttgtggacctcaagggcgaccccttcttggcttcgcccaccagtgaccgtgagatcatagcacctaagataaaggagcgaacccacaatgtcactgagaaggtcacccaggtcctgtccctgggcgccgacgtgctgcctgagtacaagctgcaggcaccgcgcatccaccgctggaccatcctgcattacagccccttcaaggccgtgtgggactggctcatcctgctgctggtcatctacacggctgtcttcacaccctactcggctgccttcctgctgaaggagacggaagaaggcccgcctgctaccgagtgtggctacgcctgccagccgctggctgtggtggacctcatcgtggacatcatgttcattgtggacatcctcatcaacttccgcaccacctacgtcaatgccaacgaggaggtggtcagccaccccggccgcatcgccgtccactacttcaagggctggttcctcatcgacatggtggccgccatccccttcgacctgctcatcttcggctctggctctgaggagctgatcgggctgctgaagactgcgcggctgctgcggctggtgcgcgtggcgcggaagctggatcgctactcagagtacggcgcggccgtgctgttcttgctcatgtgcacctttgcgctcatcgcgcactggctagcctgcatctggtacgccatcggcaacatggagcagccacacatggactcacgcatcggctggctgcacaacctgggcgaccagataggcaaaccctacaacagcagcggcctgggcggcccctccatcaaggacaagtatgtgacggcgctctacttcaccttcagcagcctcaccagtgtgggcttcggcaacgtctctcccaacaccaactcagagaagatcttctccatctgcgtcatgctcattggctccctcatgtatgctagcatcttcggcaacgtgtcggccatcatccagcggctgtactcgggcacagcccgctaccacacacagatgctgcgggtgcgggagttcatccgcttccaccagatccccaatcccctgcgccagcgcctcgaggagtacttccagcacgcctggtcctacaccaacggcatcgacatgaacgcggtgctgaagggcttccctgagtgcctgcaggctgacatctgcctgcacctgaaccgctcactgctgcagcactgcaaacccttccgaggggccaccaagggctgccttcgggccctggccatgaagttcaagaccacacatgcaccgccaggggacacactggtgcatgctggggacctgctcaccgccctgtacttcatctcccggggctccatcgagatcctgcggggcgacgtcgtcgtggccatcctggggaagaatgacatctttggggagcctctgaacctgtatgcaaggcctggcaagtcgaacggggatgtgcgggccctcacctactgtgacctacacaagatccatcgggacgacctgctggaggtgctggacatgtaccctgagttctccgaccacttctggtccagcctggagatcaccttcaacctgcgagataccaacatgatcccgggctcccccggcagtacggagttagagggtggcttcagtcggcaacgcaagcgcaagttgtccttccgcaggcgcacggacaaggacacggagcagccaggggaggtgtcggccttggggccgggccgggcgggggcagggccgagtagccggggccggccgggggggccgtggggggagagcccgtccagtggcccctccagccctgagagcagtgaggatgagggcccaggccgcagctccagccccctccgcctggtgcccttctccagccccaggccccccggagagccgccgggtggggagcccctgatggaggactgcgagaagagcagcgacacttgcaaccccctgtcaggcgccttctcaggagtgtccaacattttcagcttctggggggacagtcggggccgccagtaccaggagctccctcgatgccccgcccccacccccagcctcctcaacatccccctctccagcccgggtcggcggccccggggcgacgtggagagcaggctggatgccctccagcgccagctcaacaggctggagacccggctgagtgcagacatggccactgtcctgcagctgctacagaggcagatgacgctggtcccgcccgcctacagtgctgtgaccaccccggggcctggccccacttccacatccccgctgttgcccgtcagccccctccccaccctcaccttggactcgctttctcaggtttcccagttcatggcgtgtgaggagctgcccccgggggccccagagcttccccaagaaggccccacacgacgcctctccctaccgggccagctgggggccctcacctcccagcccctgcacagacacggctcggacccgggcagttagtggggctgcccagtgtggacacgtggctcacccagggatcaaggcgctgctgggccgctccccttggaggccctgctcaggaggccctgaccgtggaaggggagaggaactcgaaagcacagctcctcccccagcccttgggaccatcttctcctgcagtcccctgggccccagtgagaggggcaggggcagggccggcagtaggtggggcctgtggtccccccactgccctgagggcattagctggtctaactgcccggaggcacccggccctgggccttaggcacctcaaggacttttctgctatttactgctcttattgttaaggataataattaaggatcatatgaataattaatgaagatgctgatgactatgaataataaataattatcctgaggaga

SEQ ID NO: 746 - DNA, 3884 bp, Homo sapiens
  source 1..3884: mol_type = genomic DNA
  misc_feature 1..3884: note = cDNA of KCNH2 gene SNP c.3032A>G (p.Glu1011Gly)
atgccggtgcggaggggccacgtcgcgccgcagaacaccttcctggacaccatcatccgcaagtttgagggccagagccgtaagttcatcatcgccaacgctcgggtggagaactgcgccgtcatctactgcaacgacggcttctgcgagctgtgcggctactcgcgggccgaggtgatgcagcgaccctgcacctgcgacttcctgcacgggccgcgcacgcagcgccgcgctgccgcgcagatcgcgcaggcactgctgggcgccgaggagcgcaaagtggaaatcgccttctaccggaaagatgggagctgcttcctatgtctggtggatgtggtgcccgtgaagaacgaggatggggctgtcatcatgttcatcctcaatttcgaggtggtgatggagaaggacatggtggggtccccggctcatgacaccaaccaccggggcccccccaccagctggctggccccaggccgcgccaagaccttccgcctgaagctgcccgcgctgctggcgctgacggcccgggagtcgtcggtgcggtcgggcggcgcgggcggcgcgggcgccccgggggccgtggtggtggacgtggacctgacgcccgcggcacccagcagcgagtcgctggccctggacgaagtgacagccatggacaaccacgtggcagggctcgggcccgcggaggagcggcgtgcgctggtgggtcccggctctccgccccgcagcgcgcccggccagctcccatcgccccgggcgcacagcctcaaccccgacgcctcgggctccagctgcagcctggcccggacgcgctcccgagaaagctgcgccagcgtgcgccgcgcctcgtcggccgacgacatcgaggccatgcgcgccggggtgctgcccccgccaccgcgccacgccagcaccggggccatgcacccactgcgcagcggcttgctcaactccacctcggactccgacctcgtgcgctaccgcaccattagcaagattccccaaatcaccctcaactttgtggacctcaagggcgaccccttcttggcttcgcccaccagtgaccgtgagatcatagcacctaagataaaggagcgaacccacaatgtcactgagaaggtcacccaggtcctgtccctgggcgccgacgtgctgcctgagtacaagctgcaggcaccgcgcatccaccgctggaccatcctgcattacagccccttcaaggccgtgtgggactggctcatcctgctgctggtcatctacacggctgtcttcacaccctactcggctgccttcctgctgaaggagacggaagaaggcccgcctgctaccgagtgtggctacgcctgccagccgctggctgtggtggacctcatcgtggacatcatgttcattgtggacatcctcatcaacttccgcaccacctacgtcaatgccaacgaggaggtggtcagccaccccggccgcatcgccgtccactacttcaagggctggttcctcatcgacatggtggccgccatccccttcgacctgctcatcttcggctctggctctgaggagctgatcgggctgctgaagactgcgcggctgctgcggctggtgcgcgtggcgcggaagctggatcgctactcagagtacggcgcggccgtgctgttcttgctcatgtgcacctttgcgctcatcgcgcactggctagcctgcatctggtacgccatcggcaacatggagcagccacacatggactcacgcatcggctggctgcacaacctgggcgaccagataggcaaaccctacaacagcagcggcctgggcggcccctccatcaaggacaagtatgtgacggcgctctacttcaccttcagcagcctcaccagtgtgggcttcggcaacgtctctcccaacaccaactcagagaagatcttctccatctgcgtcatgctcattggctccctcatgtatgctagcatcttcggcaacgtgtcggccatcatccagcggctgtactcgggcacagcccgctaccacacacagatgctgcgggtgcgggagttcatccgcttccaccagatccccaatcccctgcgccagcgcctcgaggagtacttccagcacgcctggtcctacaccaacggcatcgacatgaacgcggtgctgaagggcttccctgagtgcctgcaggctgacatctgcctgcacctgaaccgctcactgctgcagcactgcaaacccttccgaggggccaccaagggctgccttcgggccctggccatgaagttcaagaccacacatgcaccgccaggggacacactggtgcatgctggggacctgctcaccgccctgtacttcatctcccggggctccatcgagatcctgcggggcgacgtcgtcgtggccatcctggggaagaatgacatctttggggagcctctgaacctgtatgcaaggcctggcaagtcgaacggggatgtgcgggccctcacctactgtgacctacacaagatccatcgggacgacctgctggaggtgctggacatgtaccctgagttctccgaccacttctggtccagcctggagatcaccttcaacctgcgagataccaacatgatcccgggctcccccggcagtacggagttagagggtggcttcagtcggcaacgcaagcgcaagttgtccttccgcaggcgcacggacaaggacacggagcagccaggggaggtgtcggccttggggccgggccgggcgggggcagggccgagtagccggggccggccgggggggccgtggggggagagcccgtccagtggcccctccagccctgagagcagtgaggatgagggcccaggccgcagctccagccccctccgcctggtgcccttctccagccccaggccccccggagagccgccgggtggggagcccctgatggaggactgcgagaagagcagcgacacttgcaaccccctgtcaggcgccttctcaggagtgtccaacattttcagcttctggggggacagtcggggccgccagtaccaggggctccctcgatgccccgcccccacccccagcctcctcaacatccccctctccagcccgggtcggcggccccggggcgacgtggagagcaggctggatgccctccagcgccagctcaacaggctggagacccggctgagtgcagacatggccactgtcctgcagctgctacagaggcagatgacgctggtcccgcccgcctacagtgctgtgaccaccccggggcctggccccacttccacatccccgctgttgcccgtcagccccctccccaccctcaccttggactcgctttctcaggtttcccagttcatggcgtgtgaggagctgcccccgggggccccagagcttccccaagaaggccccacacgacgcctctccctaccgggccagctgggggccctcacctcccagcccctgcacagacacggctcggacccgggcagttagtggggctgcccagtgtggacacgtggctcacccagggatcaaggcgctgctgggccgctccccttggaggccctgctcaggaggccctgaccgtggaaggggagaggaactcgaaagcacagctcctcccccagcccttgggaccatcttctcctgcagtcccctgggccccagtgagaggggcaggggcagggccggcagtaggtggggcctgtggtccccccactgccctgagggcattagctggtctaactgcccggaggcacccggccctgggccttaggcacctcaaggacttttctgctatttactgctcttattgttaaggataataattaaggatcatatgaataattaatgaagatgctgatgactatgaataataaataattatcctgaggaga

SEQ ID NO: 747 - DNA, 3884 bp, Homo sapiens
  source 1..3884: mol_type = genomic DNA
  misc_feature 1..3884: note = cDNA of KCNH2 gene SNP c.303A>T (p.Lys101Asn)
atgccggtgcggaggggccacgtcgcgccgcagaacaccttcctggacaccatcatccgcaagtttgagggccagagccgtaagttcatcatcgccaacgctcgggtggagaactgcgccgtcatctactgcaacgacggcttctgcgagctgtgcggctactcgcgggccgaggtgatgcagcgaccctgcacctgcgacttcctgcacgggccgcgcacgcagcgccgcgctgccgcgcagatcgcgcaggcactgctgggcgccgaggagcgcaaagtggaaatcgccttctaccggaatgatgggagctgcttcctatgtctggtggatgtggtgcccgtgaagaacgaggatggggctgtcatcatgttcatcctcaatttcgaggtggtgatggagaaggacatggtggggtccccggctcatgacaccaaccaccggggcccccccaccagctggctggccccaggccgcgccaagaccttccgcctgaagctgcccgcgctgctggcgctgacggcccgggagtcgtcggtgcggtcgggcggcgcgggcggcgcgggcgccccgggggccgtggtggtggacgtggacctgacgcccgcggcacccagcagcgagtcgctggccctggacgaagtgacagccatggacaaccacgtggcagggctcgggcccgcggaggagcggcgtgcgctggtgggtcccggctctccgccccgcagcgcgcccggccagctcccatcgccccgggcgcacagcctcaaccccgacgcctcgggctccagctgcagcctggcccggacgcgctcccgagaaagctgcgccagcgtgcgccgcgcctcgtcggccgacgacatcgaggccatgcgcgccggggtgctgcccccgccaccgcgccacgccagcaccggggccatgcacccactgcgcagcggcttgctcaactccacctcggactccgacctcgtgcgctaccgcaccattagcaagattccccaaatcaccctcaactttgtggacctcaagggcgaccccttcttggcttcgcccaccagtgaccgtgagatcatagcacctaagataaaggagcgaacccacaatgtcactgagaaggtcacccaggtcctgtccctgggcgccgacgtgctgcctgagtacaagctgcaggcaccgcgcatccaccgctggaccatcctgcattacagccccttcaaggccgtgtgggactggctcatcctgctgctggtcatctacacggctgtcttcacaccctactcggctgccttcctgctgaaggagacggaagaaggcccgcctgctaccgagtgtggctacgcctgccagccgctggctgtggtggacctcatcgtggacatcatgttcattgtggacatcctcatcaacttccgcaccacctacgtcaatgccaacgaggaggtggtcagccaccccggccgcatcgccgtccactacttcaagggctggttcctcatcgacatggtggccgccatccccttcgacctgctcatcttcggctctggctctgaggagctgatcgggctgctgaagactgcgcggctgctgcggctggtgcgcgtggcgcggaagctggatcgctactcagagtacggcgcggccgtgctgttcttgctcatgtgcacctttgcgctcatcgcgcactggctagcctgcatctggtacgccatcggcaacatggagcagccacacatggactcacgcatcggctggctgcacaacctgggcgaccagataggcaaaccctacaacagcagcggcctgggcggcccctccatcaaggacaagtatgtgacggcgctctacttcaccttcagcagcctcaccagtgtgggcttcggcaacgtctctcccaacaccaactcagagaagatcttctccatctgcgtcatgctcattggctccctcatgtatgctagcatcttcggcaacgtgtcggccatcatccagcggctgtactcgggcacagcccgctaccacacacagatgctgcgggtgcgggagttcatccgcttccaccagatccccaatcccctgcgccagcgcctcgaggagtacttccagcacgcctggtcctacaccaacggcatcgacatgaacgcggtgctgaagggcttccctgagtgcctgcaggctgacatctgcctgcacctgaaccgctcactgctgcagcactgcaaacccttccgaggggccaccaagggctgccttcgggccctggccatgaagttcaagaccacacatgcaccgccaggggacacactggtgcatgctggggacctgctcaccgccctgtacttcatctcccggggctccatcgagatcctgcggggcgacgtcgtcgtggccatcctggggaagaatgacatctttggggagcctctgaacctgtatgcaaggcctggcaagtcgaacggggatgtgcgggccctcacctactgtgacctacacaagatccatcgggacgacctgctggaggtgctggacatgtaccctgagttctccgaccacttctggtccagcctggagatcaccttcaacctgcgagataccaacatgatcccgggctcccccggcagtacggagttagagggtggcttcagtcggcaacgcaagcgcaagttgtccttccgcaggcgcacggacaaggacacggagcagccaggggaggtgtcggccttggggccgggccgggcgggggcagggccgagtagccggggccggccgggggggccgtggggggagagcccgtccagtggcccctccagccctgagagcagtgaggatgagggcccaggccgcagctccagccccctccgcctggtgcccttctccagccccaggccccccggagagccgccgggtggggagcccctgatggaggactgcgagaagagcagcgacacttgcaaccccctgtcaggcgccttctcaggagtgtccaacattttcagcttctggggggacagtcggggccgccagtaccaggagctccctcgatgccccgcccccacccccagcctcctcaacatccccctctccagcccgggtcggcggccccggggcgacgtggagagcaggctggatgccctccagcgccagctcaacaggctggagacccggctgagtgcagacatggccactgtcctgcagctgctacagaggcagatgacgctggtcccgcccgcctacagtgctgtgaccaccccggggcctggccccacttccacatccccgctgttgcccgtcagccccctccccaccctcaccttggactcgctttctcaggtttcccagttcatggcgtgtgaggagctgcccccgggggccccagagcttccccaagaaggccccacacgacgcctctccctaccgggccagctgggggccctcacctcccagcccctgcacagacacggctcggacccgggcagttagtggggctgcccagtgtggacacgtggctcacccagggatcaaggcgctgctgggccgctccccttggaggccctgctcaggaggccctgaccgtggaaggggagaggaactcgaaagcacagctcctcccccagcccttgggaccatcttctcctgcagtcccctgggccccagtgagaggggcaggggcagggccggcagtaggtggggcctgtggtccccccactgccctgagggcattagctggtctaactgcccggaggcacccggccctgggccttaggcacctcaaggacttttctgctatttactgctcttattgttaaggataataattaaggatcatatgaataattaatgaagatgctgatgactatgaataataaataattatcctgaggaga

SEQ ID NO: 748 - DNA, 3884 bp, Homo sapiens
  source 1..3884: mol_type = genomic DNA
  misc_feature 1..3884: note = cDNA of KCNH2 gene SNP c.3040C>T (p.Arg1014Ter)
atgccggtgcggaggggccacgtcgcgccgcagaacaccttcctggacaccatcatccgcaagtttgagggccagagccgtaagttcatcatcgccaacgctcgggtggagaactgcgccgtcatctactgcaacgacggcttctgcgagctgtgcggctactcgcgggccgaggtgatgcagcgaccctgcacctgcgacttcctgcacgggccgcgcacgcagcgccgcgctgccgcgcagatcgcgcaggcactgctgggcgccgaggagcgcaaagtggaaatcgccttctaccggaaagatgggagctgcttcctatgtctggtggatgtggtgcccgtgaagaacgaggatggggctgtcatcatgttcatcctcaatttcgaggtggtgatggagaaggacatggtggggtccccggctcatgacaccaaccaccggggcccccccaccagctggctggccccaggccgcgccaagaccttccgcctgaagctgcccgcgctgctggcgctgacggcccgggagtcgtcggtgcggtcgggcggcgcgggcggcgcgggcgccccgggggccgtggtggtggacgtggacctgacgcccgcggcacccagcagcgagtcgctggccctggacgaagtgacagccatggacaaccacgtggcagggctcgggcccgcggaggagcggcgtgcgctggtgggtcccggctctccgccccgcagcgcgcccggccagctcccatcgccccgggcgcacagcctcaaccccgacgcctcgggctccagctgcagcctggcccggacgcgctcccgagaaagctgcgccagcgtgcgccgcgcctcgtcggccgacgacatcgaggccatgcgcgccggggtgctgcccccgccaccgcgccacgccagcaccggggccatgcacccactgcgcagcggcttgctcaactccacctcggactccgacctcgtgcgctaccgcaccattagcaagattccccaaatcaccctcaactttgtggacctcaagggcgaccccttcttggcttcgcccaccagtgaccgtgagatcatagcacctaagataaaggagcgaacccacaatgtcactgagaaggtcacccaggtcctgtccctgggcgccgacgtgctgcctgagtacaagctgcaggcaccgcgcatccaccgctggaccatcctgcattacagccccttcaaggccgtgtgggactggctcatcctgctgctggtcatctacacggctgtcttcacaccctactcggctgccttcctgctgaaggagacggaagaaggcccgcctgctaccgagtgtggctacgcctgccagccgctggctgtggtggacctcatcgtggacatcatgttcattgtggacatcctcatcaacttccgcaccacctacgtcaatgccaacgaggaggtggtcagccaccccggccgcatcgccgtccactacttcaagggctggttcctcatcgacatggtggccgccatccccttcgacctgctcatcttcggctctggctctgaggagctgatcgggctgctgaagactgcgcggctgctgcggctggtgcgcgtggcgcggaagctggatcgctactcagagtacggcgcggccgtgctgttcttgctcatgtgcacctttgcgctcatcgcgcactggctagcctgcatctggtacgccatcggcaacatggagcagccacacatggactcacgcatcggctggctgcacaacctgggcgaccagataggcaaaccctacaacagcagcggcctgggcggcccctccatcaaggacaagtatgtgacggcgctctacttcaccttcagcagcctcaccagtgtgggcttcggcaacgtctctcccaacaccaactcagagaagatcttctccatctgcgtcatgctcattggctccctcatgtatgctagcatcttcggcaacgtgtcggccatcatccagcggctgtactcgggcacagcccgctaccacacacagatgctgcgggtgcgggagttcatccgcttccaccagatccccaatcccctgcgccagcgcctcgaggagtacttccagcacgcctggtcctacaccaacggcatcgacatgaacgcggtgctgaagggcttccctgagtgcctgcaggctgacatctgcctgcacctgaaccgctcactgctgcagcactgcaaacccttccgaggggccaccaagggctgccttcgggccctggccatgaagttcaagaccacacatgcaccgccaggggacacactggtgcatgctggggacctgctcaccgccctgtacttcatctcccggggctccatcgagatcctgcggggcgacgtcgtcgtggccatcctggggaagaatgacatctttggggagcctctgaacctgtatgcaaggcctggcaagtcgaacggggatgtgcgggccctcacctactgtgacctacacaagatccatcgggacgacctgctggaggtgctggacatgtaccctgagttctccgaccacttctggtccagcctggagatcaccttcaacctgcgagataccaacatgatcccgggctcccccggcagtacggagttagagggtggcttcagtcggcaacgcaagcgcaagttgtccttccgcaggcgcacggacaaggacacggagcagccaggggaggtgtcggccttggggccgggccgggcgggggcagggccgagtagccggggccggccgggggggccgtggggggagagcccgtccagtggcccctccagccctgagagcagtgaggatgagggcccaggccgcagctccagccccctccgcctggtgcccttctccagccccaggccccccggagagccgccgggtggggagcccctgatggaggactgcgagaagagcagcgacacttgcaaccccctgtcaggcgccttctcaggagtgtccaacattttcagcttctggggggacagtcggggccgccagtaccaggagctcccttgatgccccgcccccacccccagcctcctcaacatccccctctccagcccgggtcggcggccccggggcgacgtggagagcaggctggatgccctccagcgccagctcaacaggctggagacccggctgagtgcagacatggccactgtcctgcagctgctacagaggcagatgacgctggtcccgcccgcctacagtgctgtgaccaccccggggcctggccccacttccacatccccgctgttgcccgtcagccccctccccaccctcaccttggactcgctttctcaggtttcccagttcatggcgtgtgaggagctgcccccgggggccccagagcttccccaagaaggccccacacgacgcctctccctaccgggccagctgggggccctcacctcccagcccctgcacagacacggctcggacccgggcagttagtggggctgcccagtgtggacacgtggctcacccagggatcaaggcgctgctgggccgctccccttggaggccctgctcaggaggccctgaccgtggaaggggagaggaactcgaaagcacagctcctcccccagcccttgggaccatcttctcctgcagtcccctgggccccagtgagaggggcaggggcagggccggcagtaggtggggcctgtggtccccccactgccctgagggcattagctggtctaactgcccggaggcacccggccctgggccttaggcacctcaaggacttttctgctatttactgctcttattgttaaggataataattaaggatcatatgaataattaatgaagatgctgatgactatgaataataaataattatcctgaggaga

SEQ ID NO: 749 - DNA, 3884 bp, Homo sapiens
  source 1..3884: mol_type = genomic DNA
  misc_feature 1..3884: note = cDNA of KCNH2 gene SNP c.3041G>A (p.Arg1014Gln)
atgccggtgcggaggggccacgtcgcgccgcagaacaccttcctggacaccatcatccgcaagtttgagggccagagccgtaagttcatcatcgccaacgctcgggtggagaactgcgccgtcatctactgcaacgacggcttctgcgagctgtgcggctactcgcgggccgaggtgatgcagcgaccctgcacctgcgacttcctgcacgggccgcgcacgcagcgccgcgctgccgcgcagatcgcgcaggcactgctgggcgccgaggagcgcaaagtggaaatcgccttctaccggaaagatgggagctgcttcctatgtctggtggatgtggtgcccgtgaagaacgaggatggggctgtcatcatgttcatcctcaatttcgaggtggtgatggagaaggacatggtggggtccccggctcatgacaccaaccaccggggcccccccaccagctggctggccccaggccgcgccaagaccttccgcctgaagctgcccgcgctgctggcgctgacggcccgggagtcgtcggtgcggtcgggcggcgcgggcggcgcgggcgccccgggggccgtggtggtggacgtggacctgacgcccgcggcacccagcagcgagtcgctggccctggacgaagtgacagccatggacaaccacgtggcagggctcgggcccgcggaggagcggcgtgcgctggtgggtcccggctctccgccccgcagcgcgcccggccagctcccatcgccccgggcgcacagcctcaaccccgacgcctcgggctccagctgcagcctggcccggacgcgctcccgagaaagctgcgccagcgtgcgccgcgcctcgtcggccgacgacatcgaggccatgcgcgccggggtgctgcccccgccaccgcgccacgccagcaccggggccatgcacccactgcgcagcggcttgctcaactccacctcggactccgacctcgtgcgctaccgcaccattagcaagattccccaaatcaccctcaactttgtggacctcaagggcgaccccttcttggcttcgcccaccagtgaccgtgagatcatagcacctaagataaaggagcgaacccacaatgtcactgagaaggtcacccaggtcctgtccctgggcgccgacgtgctgcctgagtacaagctgcaggcaccgcgcatccaccgctggaccatcctgcattacagccccttcaaggccgtgtgggactggctcatcctgctgctggtcatctacacggctgtcttcacaccctactcggctgccttcctgctgaaggagacggaagaaggcccgcctgctaccgagtgtggctacgcctgccagccgctggctgtggtggacctcatcgtggacatcatgttcattgtggacatcctcatcaacttccgcaccacctacgtcaatgccaacgaggaggtggtcagccaccccggccgcatcgccgtccactacttcaagggctggttcctcatcgacatggtggccgccatccccttcgacctgctcatcttcggctctggctctgaggagctgatcgggctgctgaagactgcgcggctgctgcggctggtgcgcgtggcgcggaagctggatcgctactcagagtacggcgcggccgtgctgttcttgctcatgtgcacctttgcgctcatcgcgcactggctagcctgcatctggtacgccatcggcaacatggagcagccacacatggactcacgcatcggctggctgcacaacctgggcgaccagataggcaaaccctacaacagcagcggcctgggcggcccctccatcaaggacaagtatgtgacggcgctctacttcaccttcagcagcctcaccagtgtgggcttcggcaacgtctctcccaacaccaactcagagaagatcttctccatctgcgtcatgctcattggctccctcatgtatgctagcatcttcggcaacgtgtcggccatcatccagcggctgtactcgggcacagcccgctaccacacacagatgctgcgggtgcgggagttcatccgcttccaccagatccccaatcccctgcgccagcgcctcgaggagtacttccagcacgcctggtcctacaccaacggcatcgacatgaacgcggtgctgaagggcttccctgagtgcctgcaggctgacatctgcctgcacctgaaccgctcactgctgcagcactgcaaacccttccgaggggccaccaagggctgccttcgggccctggccatgaagttcaagaccacacatgcaccgccaggggacacactggtgcatgctggggacctgctcaccgccctgtacttcatctcccggggctccatcgagatcctgcggggcgacgtcgtcgtggccatcctggggaagaatgacatctttggggagcctctgaacctgtatgcaaggcctggcaagtcgaacggggatgtgcgggccctcacctactgtgacctacacaagatccatcgggacgacctgctggaggtgctggacatgtaccctgagttctccgaccacttctggtccagcctggagatcaccttcaacctgcgagataccaacatgatcccgggctcccccggcagtacggagttagagggtggcttcagtcggcaacgcaagcgcaagttgtccttccgcaggcgcacggacaaggacacggagcagccaggggaggtgtcggccttggggccgggccgggcgggggcagggccgagtagccggggccggccgggggggccgtggggggagagcccgtccagtggcccctccagccctgagagcagtgaggatgagggcccaggccgcagctccagccccctccgcctggtgcccttctccagccccaggccccccggagagccgccgggtggggagcccctgatggaggactgcgagaagagcagcgacacttgcaaccccctgtcaggcgccttctcaggagtgtccaacattttcagcttctggggggacagtcggggccgccagtaccaggagctccctcaatgccccgcccccacccccagcctcctcaacatccccctctccagcccgggtcggcggccccggggcgacgtggagagcaggctggatgccctccagcgccagctcaacaggctggagacccggctgagtgcagacatggccactgtcctgcagctgctacagaggcagatgacgctggtcccgcccgcctacagtgctgtgaccaccccggggcctggccccacttccacatccccgctgttgcccgtcagccccctccccaccctcaccttggactcgctttctcaggtttcccagttcatggcgtgtgaggagctgcccccgggggccccagagcttccccaagaaggccccacacgacgcctctccctaccgggccagctgggggccctcacctcccagcccctgcacagacacggctcggacccgggcagttagtggggctgcccagtgtggacacgtggctcacccagggatcaaggcgctgctgggccgctccccttggaggccctgctcaggaggccctgaccgtggaaggggagaggaactcgaaagcacagctcctcccccagcccttgggaccatcttctcctgcagtcccctgggccccagtgagaggggcaggggcagggccggcagtaggtggggcctgtggtccccccactgccctgagggcattagctggtctaactgcccggaggcacccggccctgggccttaggcacctcaaggacttttctgctatttactgctcttattgttaaggataataattaaggatcatatgaataattaatgaagatgctgatgactatgaataataaataattatcctgaggaga

SEQ ID NO: 750 - DNA, 3884 bp, Homo sapiens
  source 1..3884: mol_type = genomic DNA
  misc_feature 1..3884: note = cDNA of KCNH2 gene SNP c.3049G>T (p.Ala1017Ser)
atgccggtgcggaggggccacgtcgcgccgcagaacaccttcctggacaccatcatccgcaagtttgagggccagagccgtaagttcatcatcgccaacgctcgggtggagaactgcgccgtcatctactgcaacgacggcttctgcgagctgtgcggctactcgcgggccgaggtgatgcagcgaccctgcacctgcgacttcctgcacgggccgcgcacgcagcgccgcgctgccgcgcagatcgcgcaggcactgctgggcgccgaggagcgcaaagtggaaatcgccttctaccggaaagatgggagctgcttcctatgtctggtggatgtggtgcccgtgaagaacgaggatggggctgtcatcatgttcatcctcaatttcgaggtggtgatggagaaggacatggtggggtccccggctcatgacaccaaccaccggggcccccccaccagctggctggccccaggccgcgccaagaccttccgcctgaagctgcccgcgctgctggcgctgacggcccgggagtcgtcggtgcggtcgggcggcgcgggcggcgcgggcgccccgggggccgtggtggtggacgtggacctgacgcccgcggcacccagcagcgagtcgctggccctggacgaagtgacagccatggacaaccacgtggcagggctcgggcccgcggaggagcggcgtgcgctggtgggtcccggctctccgccccgcagcgcgcccggccagctcccatcgccccgggcgcacagcctcaaccccgacgcctcgggctccagctgcagcctggcccggacgcgctcccgagaaagctgcgccagcgtgcgccgcgcctcgtcggccgacgacatcgaggccatgcgcgccggggtgctgcccccgccaccgcgccacgccagcaccggggccatgcacccactgcgcagcggcttgctcaactccacctcggactccgacctcgtgcgctaccgcaccattagcaagattccccaaatcaccctcaactttgtggacctcaagggcgaccccttcttggcttcgcccaccagtgaccgtgagatcatagcacctaagataaaggagcgaacccacaatgtcactgagaaggtcacccaggtcctgtccctgggcgccgacgtgctgcctgagtacaagctgcaggcaccgcgcatccaccgctggaccatcctgcattacagccccttcaaggccgtgtgggactggctcatcctgctgctggtcatctacacggctgtcttcacaccctactcggctgccttcctgctgaaggagacggaagaaggcccgcctgctaccgagtgtggctacgcctgccagccgctggctgtggtggacctcatcgtggacatcatgttcattgtggacatcctcatcaacttccgcaccacctacgtcaatgccaacgaggaggtggtcagccaccccggccgcatcgccgtccactacttcaagggctggttcctcatcgacatggtggccgccatccccttcgacctgctcatcttcggctctggctctgaggagctgatcgggctgctgaagactgcgcggctgctgcggctggtgcgcgtggcgcggaagctggatcgctactcagagtacggcgcggccgtgctgttcttgctcatgtgcacctttgcgctcatcgcgcactggctagcctgcatctggtacgccatcggcaacatggagcagccacacatggactcacgcatcggctggctgcacaacctgggcgaccagataggcaaaccctacaacagcagcggcctgggcggcccctccatcaaggacaagtatgtgacggcgctctacttcaccttcagcagcctcaccagtgtgggcttcggcaacgtctctcccaacaccaactcagagaagatcttctccatctgcgtcatgctcattggctccctcatgtatgctagcatcttcggcaacgtgtcggccatcatccagcggctgtactcgggcacagcccgctaccacacacagatgctgcgggtgcgggagttcatccgcttccaccagatccccaatcccctgcgccagcgcctcgaggagtacttccagcacgcctggtcctacaccaacggcatcgacatgaacgcggtgctgaagggcttccctgagtgcctgcaggctgacatctgcctgcacctgaaccgctcactgctgcagcactgcaaacccttccgaggggccaccaagggctgccttcgggccctggccatgaagttcaagaccacacatgcaccgccaggggacacactggtgcatgctggggacctgctcaccgccctgtacttcatctcccggggctccatcgagatcctgcggggcgacgtcgtcgtggccatcctggggaagaatgacatctttggggagcctctgaacctgtatgcaaggcctggcaagtcgaacggggatgtgcgggccctcacctactgtgacctacacaagatccatcgggacgacctgctggaggtgctggacatgtaccctgagttctccgaccacttctggtccagcctggagatcaccttcaacctgcgagataccaacatgatcccgggctcccccggcagtacggagttagagggtggcttcagtcggcaacgcaagcgcaagttgtccttccgcaggcgcacggacaaggacacggagcagccaggggaggtgtcggccttggggccgggccgggcgggggcagggccgagtagccggggccggccgggggggccgtggggggagagcccgtccagtggcccctccagccctgagagcagtgaggatgagggcccaggccgcagctccagccccctccgcctggtgcccttctccagccccaggccccccggagagccgccgggtggggagcccctgatggaggactgcgagaagagcagcgacacttgcaaccccctgtcaggcgccttctcaggagtgtccaacattttcagcttctggggggacagtcggggccgccagtaccaggagctccctcgatgcccctcccccacccccagcctcctcaacatccccctctccagcccgggtcggcggccccggggcgacgtggagagcaggctggatgccctccagcgccagctcaacaggctggagacccggctgagtgcagacatggccactgtcctgcagctgctacagaggcagatgacgctggtcccgcccgcctacagtgctgtgaccaccccggggcctggccccacttccacatccccgctgttgcccgtcagccccctccccaccctcaccttggactcgctttctcaggtttcccagttcatggcgtgtgaggagctgcccccgggggccccagagcttccccaagaaggccccacacgacgcctctccctaccgggccagctgggggccctcacctcccagcccctgcacagacacggctcggacccgggcagttagtggggctgcccagtgtggacacgtggctcacccagggatcaaggcgctgctgggccgctccccttggaggccctgctcaggaggccctgaccgtggaaggggagaggaactcgaaagcacagctcctcccccagcccttgggaccatcttctcctgcagtcccctgggccccagtgagaggggcaggggcagggccggcagtaggtggggcctgtggtccccccactgccctgagggcattagctggtctaactgcccggaggcacccggccctgggccttaggcacctcaaggacttttctgctatttactgctcttattgttaaggataataattaaggatcatatgaataattaatgaagatgctgatgactatgaataataaataattatcctgaggaga

SEQ ID NO: 751 - DNA, 3884 bp, Homo sapiens
  source 1..3884: mol_type = genomic DNA
  misc_feature 1..3884: note = cDNA of KCNH2 gene SNP c.3052C>G (p.Pro1018Ala)
atgccggtgcggaggggccacgtcgcgccgcagaacaccttcctggacaccatcatccgcaagtttgagggccagagccgtaagttcatcatcgccaacgctcgggtggagaactgcgccgtcatctactgcaacgacggcttctgcgagctgtgcggctactcgcgggccgaggtgatgcagcgaccctgcacctgcgacttcctgcacgggccgcgcacgcagcgccgcgctgccgcgcagatcgcgcaggcactgctgggcgccgaggagcgcaaagtggaaatcgccttctaccggaaagatgggagctgcttcctatgtctggtggatgtggtgcccgtgaagaacgaggatggggctgtcatcatgttcatcctcaatttcgaggtggtgatggagaaggacatggtggggtccccggctcatgacaccaaccaccggggcccccccaccagctggctggccccaggccgcgccaagaccttccgcctgaagctgcccgcgctgctggcgctgacggcccgggagtcgtcggtgcggtcgggcggcgcgggcggcgcgggcgccccgggggccgtggtggtggacgtggacctgacgcccgcggcacccagcagcgagtcgctggccctggacgaagtgacagccatggacaaccacgtggcagggctcgggcccgcggaggagcggcgtgcgctggtgggtcccggctctccgccccgcagcgcgcccggccagctcccatcgccccgggcgcacagcctcaaccccgacgcctcgggctccagctgcagcctggcccggacgcgctcccgagaaagctgcgccagcgtgcgccgcgcctcgtcggccgacgacatcgaggccatgcgcgccggggtgctgcccccgccaccgcgccacgccagcaccggggccatgcacccactgcgcagcggcttgctcaactccacctcggactccgacctcgtgcgctaccgcaccattagcaagattccccaaatcaccctcaactttgtggacctcaagggcgaccccttcttggcttcgcccaccagtgaccgtgagatcatagcacctaagataaaggagcgaacccacaatgtcactgagaaggtcacccaggtcctgtccctgggcgccgacgtgctgcctgagtacaagctgcaggcaccgcgcatccaccgctggaccatcctgcattacagccccttcaaggccgtgtgggactggctcatcctgctgctggtcatctacacggctgtcttcacaccctactcggctgccttcctgctgaaggagacggaagaaggcccgcctgctaccgagtgtggctacgcctgccagccgctggctgtggtggacctcatcgtggacatcatgttcattgtggacatcctcatcaacttccgcaccacctacgtcaatgccaacgaggaggtggtcagccaccccggccgcatcgccgtccactacttcaagggctggttcctcatcgacatggtggccgccatccccttcgacctgctcatcttcggctctggctctgaggagctgatcgggctgctgaagactgcgcggctgctgcggctggtgcgcgtggcgcggaagctggatcgctactcagagtacggcgcggccgtgctgttcttgctcatgtgcacctttgcgctcatcgcgcactggctagcctgcatctggtacgccatcggcaacatggagcagccacacatggactcacgcatcggctggctgcacaacctgggcgaccagataggcaaaccctacaacagcagcggcctgggcggcccctccatcaaggacaagtatgtgacggcgctctacttcaccttcagcagcctcaccagtgtgggcttcggcaacgtctctcccaacaccaactcagagaagatcttctccatctgcgtcatgctcattggctccctcatgtatgctagcatcttcggcaacgtgtcggccatcatccagcggctgtactcgggcacagcccgctaccacacacagatgctgcgggtgcgggagttcatccgcttccaccagatccccaatcccctgcgccagcgcctcgaggagtacttccagcacgcctggtcctacaccaacggcatcgacatgaacgcggtgctgaagggcttccctgagtgcctgcaggctgacatctgcctgcacctgaaccgctcactgctgcagcactgcaaacccttccgaggggccaccaagggctgccttcgggccctggccatgaagttcaagaccacacatgcaccgccaggggacacactggtgcatgctggggacctgctcaccgccctgtacttcatctcccggggctccatcgagatcctgcggggcgacgtcgtcgtggccatcctggggaagaatgacatctttggggagcctctgaacctgtatgcaaggcctggcaagtcgaacggggatgtgcgggccctcacctactgtgacctacacaagatccatcgggacgacctgctggaggtgctggacatgtaccctgagttctccgaccacttctggtccagcctggagatcaccttcaacctgcgagataccaacatgatcccgggctcccccggcagtacggagttagagggtggcttcagtcggcaacgcaagcgcaagttgtccttccgcaggcgcacggacaaggacacggagcagccaggggaggtgtcggccttggggccgggccgggcgggggcagggccgagtagccggggccggccgggggggccgtggggggagagcccgtccagtggcccctccagccctgagagcagtgaggatgagggcccaggccgcagctccagccccctccgcctggtgcccttctccagccccaggccccccggagagccgccgggtggggagcccctgatggaggactgcgagaagagcagcgacacttgcaaccccctgtcaggcgccttctcaggagtgtccaacattttcagcttctggggggacagtcggggccgccagtaccaggagctccctcgatgccccgccgccacccccagcctcctcaacatccccctctccagcccgggtcggcggccccggggcgacgtggagagcaggctggatgccctccagcgccagctcaacaggctggagacccggctgagtgcagacatggccactgtcctgcagctgctacagaggcagatgacgctggtcccgcccgcctacagtgctgtgaccaccccggggcctggccccacttccacatccccgctgttgcccgtcagccccctccccaccctcaccttggactcgctttctcaggtttcccagttcatggcgtgtgaggagctgcccccgggggccccagagcttccccaagaaggccccacacgacgcctctccctaccgggccagctgggggccctcacctcccagcccctgcacagacacggctcggacccgggcagttagtggggctgcccagtgtggacacgtggctcacccagggatcaaggcgctgctgggccgctccccttggaggccctgctcaggaggccctgaccgtggaaggggagaggaactcgaaagcacagctcctcccccagcccttgggaccatcttctcctgcagtcccctgggccccagtgagaggggcaggggcagggccggcagtaggtggggcctgtggtccccccactgccctgagggcattagctggtctaactgcccggaggcacccggccctgggccttaggcacctcaaggacttttctgctatttactgctcttattgttaaggataataattaaggatcatatgaataattaatgaagatgctgatgactatgaataataaataattatcctgaggaga

SEQ ID NO: 752 - DNA, 3884 bp, Homo sapiens
  source 1..3884: mol_type = genomic DNA
  misc_feature 1..3884: note = cDNA of KCNH2 gene SNP c.3053C>T (p.Pro1018Leu)
atgccggtgcggaggggccacgtcgcgccgcagaacaccttcctggacaccatcatccgcaagtttgagggccagagccgtaagttcatcatcgccaacgctcgggtggagaactgcgccgtcatctactgcaacgacggcttctgcgagctgtgcggctactcgcgggccgaggtgatgcagcgaccctgcacctgcgacttcctgcacgggccgcgcacgcagcgccgcgctgccgcgcagatcgcgcaggcactgctgggcgccgaggagcgcaaagtggaaatcgccttctaccggaaagatgggagctgcttcctatgtctggtggatgtggtgcccgtgaagaacgaggatggggctgtcatcatgttcatcctcaatttcgaggtggtgatggagaaggacatggtggggtccccggctcatgacaccaaccaccggggcccccccaccagctggctggccccaggccgcgccaagaccttccgcctgaagctgcccgcgctgctggcgctgacggcccgggagtcgtcggtgcggtcgggcggcgcgggcggcgcgggcgccccgggggccgtggtggtggacgtggacctgacgcccgcggcacccagcagcgagtcgctggccctggacgaagtgacagccatggacaaccacgtggcagggctcgggcccgcggaggagcggcgtgcgctggtgggtcccggctctccgccccgcagcgcgcccggccagctcccatcgccccgggcgcacagcctcaaccccgacgcctcgggctccagctgcagcctggcccggacgcgctcccgagaaagctgcgccagcgtgcgccgcgcctcgtcggccgacgacatcgaggccatgcgcgccggggtgctgcccccgccaccgcgccacgccagcaccggggccatgcacccactgcgcagcggcttgctcaactccacctcggactccgacctcgtgcgctaccgcaccattagcaagattccccaaatcaccctcaactttgtggacctcaagggcgaccccttcttggcttcgcccaccagtgaccgtgagatcatagcacctaagataaaggagcgaacccacaatgtcactgagaaggtcacccaggtcctgtccctgggcgccgacgtgctgcctgagtacaagctgcaggcaccgcgcatccaccgctggaccatcctgcattacagccccttcaaggccgtgtgggactggctcatcctgctgctggtcatctacacggctgtcttcacaccctactcggctgccttcctgctgaaggagacggaagaaggcccgcctgctaccgagtgtggctacgcctgccagccgctggctgtggtggacctcatcgtggacatcatgttcattgtggacatcctcatcaacttccgcaccacctacgtcaatgccaacgaggaggtggtcagccaccccggccgcatcgccgtccactacttcaagggctggttcctcatcgacatggtggccgccatccccttcgacctgctcatcttcggctctggctctgaggagctgatcgggctgctgaagactgcgcggctgctgcggctggtgcgcgtggcgcggaagctggatcgctactcagagtacggcgcggccgtgctgttcttgctcatgtgcacctttgcgctcatcgcgcactggctagcctgcatctggtacgccatcggcaacatggagcagccacacatggactcacgcatcggctggctgcacaacctgggcgaccagataggcaaaccctacaacagcagcggcctgggcggcccctccatcaaggacaagtatgtgacggcgctctacttcaccttcagcagcctcaccagtgtgggcttcggcaacgtctctcccaacaccaactcagagaagatcttctccatctgcgtcatgctcattggctccctcatgtatgctagcatcttcggcaacgtgtcggccatcatccagcggctgtactcgggcacagcccgctaccacacacagatgctgcgggtgcgggagttcatccgcttccaccagatccccaatcccctgcgccagcgcctcgaggagtacttccagcacgcctggtcctacaccaacggcatcgacatgaacgcggtgctgaagggcttccctgagtgcctgcaggctgacatctgcctgcacctgaaccgctcactgctgcagcactgcaaacccttccgaggggccaccaagggctgccttcgggccctggccatgaagttcaagaccacacatgcaccgccaggggacacactggtgcatgctggggacctgctcaccgccctgtacttcatctcccggggctccatcgagatcctgcggggcgacgtcgtcgtggccatcctggggaagaatgacatctttggggagcctctgaacctgtatgcaaggcctggcaagtcgaacggggatgtgcgggccctcacctactgtgacctacacaagatccatcgggacgacctgctggaggtgctggacatgtaccctgagttctccgaccacttctggtccagcctggagatcaccttcaacctgcgagataccaacatgatcccgggctcccccggcagtacggagttagagggtggcttcagtcggcaacgcaagcgcaagttgtccttccgcaggcgcacggacaaggacacggagcagccaggggaggtgtcggccttggggccgggccgggcgggggcagggccgagtagccggggccggccgggggggccgtggggggagagcccgtccagtggcccctccagccctgagagcagtgaggatgagggcccaggccgcagctccagccccctccgcctggtgcccttctccagccccaggccccccggagagccgccgggtggggagcccctgatggaggactgcgagaagagcagcgacacttgcaaccccctgtcaggcgccttctcaggagtgtccaacattttcagcttctggggggacagtcggggccgccagtaccaggagctccctcgatgccccgccctcacccccagcctcctcaacatccccctctccagcccgggtcggcggccccggggcgacgtggagagcaggctggatgccctccagcgccagctcaacaggctggagacccggctgagtgcagacatggccactgtcctgcagctgctacagaggcagatgacgctggtcccgcccgcctacagtgctgtgaccaccccggggcctggccccacttccacatccccgctgttgcccgtcagccccctccccaccctcaccttggactcgctttctcaggtttcccagttcatggcgtgtgaggagctgcccccgggggccccagagcttccccaagaaggccccacacgacgcctctccctaccgggccagctgggggccctcacctcccagcccctgcacagacacggctcggacccgggcagttagtggggctgcccagtgtggacacgtggctcacccagggatcaaggcgctgctgggccgctccccttggaggccctgctcaggaggccctgaccgtggaaggggagaggaactcgaaagcacagctcctcccccagcccttgggaccatcttctcctgcagtcccctgggccccagtgagaggggcaggggcagggccggcagtaggtggggcctgtggtccccccactgccctgagggcattagctggtctaactgcccggaggcacccggccctgggccttaggcacctcaaggacttttctgctatttactgctcttattgttaaggataataattaaggatcatatgaataattaatgaagatgctgatgactatgaataataaataattatcctgaggaga

SEQ ID NO: 753 - DNA, 3884 bp, Homo sapiens
  source 1..3884: mol_type = genomic DNA
  misc_feature 1..3884: note = cDNA of KCNH2 gene SNP c.3058C>T (p.Pro1020Ser)
atgccggtgcggaggggccacgtcgcgccgcagaacaccttcctggacaccatcatccgcaagtttgagggccagagccgtaagttcatcatcgccaacgctcgggtggagaactgcgccgtcatctactgcaacgacggcttctgcgagctgtgcggctactcgcgggccgaggtgatgcagcgaccctgcacctgcgacttcctgcacgggccgcgcacgcagcgccgcgctgccgcgcagatcgcgcaggcactgctgggcgccgaggagcgcaaagtggaaatcgccttctaccggaaagatgggagctgcttcctatgtctggtggatgtggtgcccgtgaagaacgaggatggggctgtcatcatgttcatcctcaatttcgaggtggtgatggagaaggacatggtggggtccccggctcatgacaccaaccaccggggcccccccaccagctggctggccccaggccgcgccaagaccttccgcctgaagctgcccgcgctgctggcgctgacggcccgggagtcgtcggtgcggtcgggcggcgcgggcggcgcgggcgccccgggggccgtggtggtggacgtggacctgacgcccgcggcacccagcagcgagtcgctggccctggacgaagtgacagccatggacaaccacgtggcagggctcgggcccgcggaggagcggcgtgcgctggtgggtcccggctctccgccccgcagcgcgcccggccagctcccatcgccccgggcgcacagcctcaaccccgacgcctcgggctccagctgcagcctggcccggacgcgctcccgagaaagctgcgccagcgtgcgccgcgcctcgtcggccgacgacatcgaggccatgcgcgccggggtgctgcccccgccaccgcgccacgccagcaccggggccatgcacccactgcgcagcggcttgctcaactccacctcggactccgacctcgtgcgctaccgcaccattagcaagattccccaaatcaccctcaactttgtggacctcaagggcgaccccttcttggcttcgcccaccagtgaccgtgagatcatagcacctaagataaaggagcgaacccacaatgtcactgagaaggtcacccaggtcctgtccctgggcgccgacgtgctgcctgagtacaagctgcaggcaccgcgcatccaccgctggaccatcctgcattacagccccttcaaggccgtgtgggactggctcatcctgctgctggtcatctacacggctgtcttcacaccctactcggctgccttcctgctgaaggagacggaagaaggcccgcctgctaccgagtgtggctacgcctgccagccgctggctgtggtggacctcatcgtggacatcatgttcattgtggacatcctcatcaacttccgcaccacctacgtcaatgccaacgaggaggtggtcagccaccccggccgcatcgccgtccactacttcaagggctggttcctcatcgacatggtggccgccatccccttcgacctgctcatcttcggctctggctctgaggagctgatcgggctgctgaagactgcgcggctgctgcggctggtgcgcgtggcgcggaagctggatcgctactcagagtacggcgcggccgtgctgttcttgctcatgtgcacctttgcgctcatcgcgcactggctagcctgcatctggtacgccatcggcaacatggagcagccacacatggactcacgcatcggctggctgcacaacctgggcgaccagataggcaaaccctacaacagcagcggcctgggcggcccctccatcaaggacaagtatgtgacggcgctctacttcaccttcagcagcctcaccagtgtgggcttcggcaacgtctctcccaacaccaactcagagaagatcttctccatctgcgtcatgctcattggctccctcatgtatgctagcatcttcggcaacgtgtcggccatcatccagcggctgtactcgggcacagcccgctaccacacacagatgctgcgggtgcgggagttcatccgcttccaccagatccccaatcccctgcgccagcgcctcgaggagtacttccagcacgcctggtcctacaccaacggcatcgacatgaacgcggtgctgaagggcttccctgagtgcctgcaggctgacatctgcctgcacctgaaccgctcactgctgcagcactgcaaacccttccgaggggccaccaagggctgccttcgggccctggccatgaagttcaagaccacacatgcaccgccaggggacacactggtgcatgctggggacctgctcaccgccctgtacttcatctcccggggctccatcgagatcctgcggggcgacgtcgtcgtggccatcctggggaagaatgacatctttggggagcctctgaacctgtatgcaaggcctggcaagtcgaacggggatgtgcgggccctcacctactgtgacctacacaagatccatcgggacgacctgctggaggtgctggacatgtaccctgagttctccgaccacttctggtccagcctggagatcaccttcaacctgcgagataccaacatgatcccgggctcccccggcagtacggagttagagggtggcttcagtcggcaacgcaagcgcaagttgtccttccgcaggcgcacggacaaggacacggagcagccaggggaggtgtcggccttggggccgggccgggcgggggcagggccgagtagccggggccggccgggggggccgtggggggagagcccgtccagtggcccctccagccctgagagcagtgaggatgagggcccaggccgcagctccagccccctccgcctggtgcccttctccagccccaggccccccggagagccgccgggtggggagcccctgatggaggactgcgagaagagcagcgacacttgcaaccccctgtcaggcgccttctcaggagtgtccaacattttcagcttctggggggacagtcggggccgccagtaccaggagctccctcgatgccccgcccccacctccagcctcctcaacatccccctctccagcccgggtcggcggccccggggcgacgtggagagcaggctggatgccctccagcgccagctcaacaggctggagacccggctgagtgcagacatggccactgtcctgcagctgctacagaggcagatgacgctggtcccgcccgcctacagtgctgtgaccaccccggggcctggccccacttccacatccccgctgttgcccgtcagccccctccccaccctcaccttggactcgctttctcaggtttcccagttcatggcgtgtgaggagctgcccccgggggccccagagcttccccaagaaggccccacacgacgcctctccctaccgggccagctgggggccctcacctcccagcccctgcacagacacggctcggacccgggcagttagtggggctgcccagtgtggacacgtggctcacccagggatcaaggcgctgctgggccgctccccttggaggccctgctcaggaggccctgaccgtggaaggggagaggaactcgaaagcacagctcctcccccagcccttgggaccatcttctcctgcagtcccctgggccccagtgagaggggcaggggcagggccggcagtaggtggggcctgtggtccccccactgccctgagggcattagctggtctaactgcccggaggcacccggccctgggccttaggcacctcaaggacttttctgctatttactgctcttattgttaaggataataattaaggatcatatgaataattaatgaagatgctgatgactatgaataataaataattatcctgaggaga

SEQ ID NO: 754 - DNA, 3884 bp, Homo sapiens
  source 1..3884: mol_type = genomic DNA
  misc_feature 1..3884: note = cDNA of KCNH2 gene SNP c.305A>C (p.Asp102Ala)
atgccggtgcggaggggccacgtcgcgccgcagaacaccttcctggacaccatcatccgcaagtttgagggccagagccgtaagttcatcatcgccaacgctcgggtggagaactgcgccgtcatctactgcaacgacggcttctgcgagctgtgcggctactcgcgggccgaggtgatgcagcgaccctgcacctgcgacttcctgcacgggccgcgcacgcagcgccgcgctgccgcgcagatcgcgcaggcactgctgggcgccgaggagcgcaaagtggaaatcgccttctaccggaaagctgggagctgcttcctatgtctggtggatgtggtgcccgtgaagaacgaggatggggctgtcatcatgttcatcctcaatttcgaggtggtgatggagaaggacatggtggggtccccggctcatgacaccaaccaccggggcccccccaccagctggctggccccaggccgcgccaagaccttccgcctgaagctgcccgcgctgctggcgctgacggcccgggagtcgtcggtgcggtcgggcggcgcgggcggcgcgggcgccccgggggccgtggtggtggacgtggacctgacgcccgcggcacccagcagcgagtcgctggccctggacgaagtgacagccatggacaaccacgtggcagggctcgggcccgcggaggagcggcgtgcgctggtgggtcccggctctccgccccgcagcgcgcccggccagctcccatcgccccgggcgcacagcctcaaccccgacgcctcgggctccagctgcagcctggcccggacgcgctcccgagaaagctgcgccagcgtgcgccgcgcctcgtcggccgacgacatcgaggccatgcgcgccggggtgctgcccccgccaccgcgccacgccagcaccggggccatgcacccactgcgcagcggcttgctcaactccacctcggactccgacctcgtgcgctaccgcaccattagcaagattccccaaatcaccctcaactttgtggacctcaagggcgaccccttcttggcttcgcccaccagtgaccgtgagatcatagcacctaagataaaggagcgaacccacaatgtcactgagaaggtcacccaggtcctgtccctgggcgccgacgtgctgcctgagtacaagctgcaggcaccgcgcatccaccgctggaccatcctgcattacagccccttcaaggccgtgtgggactggctcatcctgctgctggtcatctacacggctgtcttcacaccctactcggctgccttcctgctgaaggagacggaagaaggcccgcctgctaccgagtgtggctacgcctgccagccgctggctgtggtggacctcatcgtggacatcatgttcattgtggacatcctcatcaacttccgcaccacctacgtcaatgccaacgaggaggtggtcagccaccccggccgcatcgccgtccactacttcaagggctggttcctcatcgacatggtggccgccatccccttcgacctgctcatcttcggctctggctctgaggagctgatcgggctgctgaagactgcgcggctgctgcggctggtgcgcgtggcgcggaagctggatcgctactcagagtacggcgcggccgtgctgttcttgctcatgtgcacctttgcgctcatcgcgcactggctagcctgcatctggtacgccatcggcaacatggagcagccacacatggactcacgcatcggctggctgcacaacctgggcgaccagataggcaaaccctacaacagcagcggcctgggcggcccctccatcaaggacaagtatgtgacggcgctctacttcaccttcagcagcctcaccagtgtgggcttcggcaacgtctctcccaacaccaactcagagaagatcttctccatctgcgtcatgctcattggctccctcatgtatgctagcatcttcggcaacgtgtcggccatcatccagcggctgtactcgggcacagcccgctaccacacacagatgctgcgggtgcgggagttcatccgcttccaccagatccccaatcccctgcgccagcgcctcgaggagtacttccagcacgcctggtcctacaccaacggcatcgacatgaacgcggtgctgaagggcttccctgagtgcctgcaggctgacatctgcctgcacctgaaccgctcactgctgcagcactgcaaacccttccgaggggccaccaagggctgccttcgggccctggccatgaagttcaagaccacacatgcaccgccaggggacacactggtgcatgctggggacctgctcaccgccctgtacttcatctcccggggctccatcgagatcctgcggggcgacgtcgtcgtggccatcctggggaagaatgacatctttggggagcctctgaacctgtatgcaaggcctggcaagtcgaacggggatgtgcgggccctcacctactgtgacctacacaagatccatcgggacgacctgctggaggtgctggacatgtaccctgagttctccgaccacttctggtccagcctggagatcaccttcaacctgcgagataccaacatgatcccgggctcccccggcagtacggagttagagggtggcttcagtcggcaacgcaagcgcaagttgtccttccgcaggcgcacggacaaggacacggagcagccaggggaggtgtcggccttggggccgggccgggcgggggcagggccgagtagccggggccggccgggggggccgtggggggagagcccgtccagtggcccctccagccctgagagcagtgaggatgagggcccaggccgcagctccagccccctccgcctggtgcccttctccagccccaggccccccggagagccgccgggtggggagcccctgatggaggactgcgagaagagcagcgacacttgcaaccccctgtcaggcgccttctcaggagtgtccaacattttcagcttctggggggacagtcggggccgccagtaccaggagctccctcgatgccccgcccccacccccagcctcctcaacatccccctctccagcccgggtcggcggccccggggcgacgtggagagcaggctggatgccctccagcgccagctcaacaggctggagacccggctgagtgcagacatggccactgtcctgcagctgctacagaggcagatgacgctggtcccgcccgcctacagtgctgtgaccaccccggggcctggccccacttccacatccccgctgttgcccgtcagccccctccccaccctcaccttggactcgctttctcaggtttcccagttcatggcgtgtgaggagctgcccccgggggccccagagcttccccaagaaggccccacacgacgcctctccctaccgggccagctgggggccctcacctcccagcccctgcacagacacggctcggacccgggcagttagtggggctgcccagtgtggacacgtggctcacccagggatcaaggcgctgctgggccgctccccttggaggccctgctcaggaggccctgaccgtggaaggggagaggaactcgaaagcacagctcctcccccagcccttgggaccatcttctcctgcagtcccctgggccccagtgagaggggcaggggcagggccggcagtaggtggggcctgtggtccccccactgccctgagggcattagctggtctaactgcccggaggcacccggccctgggccttaggcacctcaaggacttttctgctatttactgctcttattgttaaggataataattaaggatcatatgaataattaatgaagatgctgatgactatgaataataaataattatcctgaggaga

SEQ ID NO: 755 - DNA, 3884 bp, Homo sapiens
  source 1..3884: mol_type = genomic DNA
  misc_feature 1..3884: note = cDNA of KCNH2 gene SNP c.305A>T (p.Asp102Val)
atgccggtgcggaggggccacgtcgcgccgcagaacaccttcctggacaccatcatccgcaagtttgagggccagagccgtaagttcatcatcgccaacgctcgggtggagaactgcgccgtcatctactgcaacgacggcttctgcgagctgtgcggctactcgcgggccgaggtgatgcagcgaccctgcacctgcgacttcctgcacgggccgcgcacgcagcgccgcgctgccgcgcagatcgcgcaggcactgctgggcgccgaggagcgcaaagtggaaatcgccttctaccggaaagttgggagctgcttcctatgtctggtggatgtggtgcccgtgaagaacgaggatggggctgtcatcatgttcatcctcaatttcgaggtggtgatggagaaggacatggtggggtccccggctcatgacaccaaccaccggggcccccccaccagctggctggccccaggccgcgccaagaccttccgcctgaagctgcccgcgctgctggcgctgacggcccgggagtcgtcggtgcggtcgggcggcgcgggcggcgcgggcgccccgggggccgtggtggtggacgtggacctgacgcccgcggcacccagcagcgagtcgctggccctggacgaagtgacagccatggacaaccacgtggcagggctcgggcccgcggaggagcggcgtgcgctggtgggtcccggctctccgccccgcagcgcgcccggccagctcccatcgccccgggcgcacagcctcaaccccgacgcctcgggctccagctgcagcctggcccggacgcgctcccgagaaagctgcgccagcgtgcgccgcgcctcgtcggccgacgacatcgaggccatgcgcgccggggtgctgcccccgccaccgcgccacgccagcaccggggccatgcacccactgcgcagcggcttgctcaactccacctcggactccgacctcgtgcgctaccgcaccattagcaagattccccaaatcaccctcaactttgtggacctcaagggcgaccccttcttggcttcgcccaccagtgaccgtgagatcatagcacctaagataaaggagcgaacccacaatgtcactgagaaggtcacccaggtcctgtccctgggcgccgacgtgctgcctgagtacaagctgcaggcaccgcgcatccaccgctggaccatcctgcattacagccccttcaaggccgtgtgggactggctcatcctgctgctggtcatctacacggctgtcttcacaccctactcggctgccttcctgctgaaggagacggaagaaggcccgcctgctaccgagtgtggctacgcctgccagccgctggctgtggtggacctcatcgtggacatcatgttcattgtggacatcctcatcaacttccgcaccacctacgtcaatgccaacgaggaggtggtcagccaccccggccgcatcgccgtccactacttcaagggctggttcctcatcgacatggtggccgccatccccttcgacctgctcatcttcggctctggctctgaggagctgatcgggctgctgaagactgcgcggctgctgcggctggtgcgcgtggcgcggaagctggatcgctactcagagtacggcgcggccgtgctgttcttgctcatgtgcacctttgcgctcatcgcgcactggctagcctgcatctggtacgccatcggcaacatggagcagccacacatggactcacgcatcggctggctgcacaacctgggcgaccagataggcaaaccctacaacagcagcggcctgggcggcccctccatcaaggacaagtatgtgacggcgctctacttcaccttcagcagcctcaccagtgtgggcttcggcaacgtctctcccaacaccaactcagagaagatcttctccatctgcgtcatgctcattggctccctcatgtatgctagcatcttcggcaacgtgtcggccatcatccagcggctgtactcgggcacagcccgctaccacacacagatgctgcgggtgcgggagttcatccgcttccaccagatccccaatcccctgcgccagcgcctcgaggagtacttccagcacgcctggtcctacaccaacggcatcgacatgaacgcggtgctgaagggcttccctgagtgcctgcaggctgacatctgcctgcacctgaaccgctcactgctgcagcactgcaaacccttccgaggggccaccaagggctgccttcgggccctggccatgaagttcaagaccacacatgcaccgccaggggacacactggtgcatgctggggacctgctcaccgccctgtacttcatctcccggggctccatcgagatcctgcggggcgacgtcgtcgtggccatcctggggaagaatgacatctttggggagcctctgaacctgtatgcaaggcctggcaagtcgaacggggatgtgcgggccctcacctactgtgacctacacaagatccatcgggacgacctgctggaggtgctggacatgtaccctgagttctccgaccacttctggtccagcctggagatcaccttcaacctgcgagataccaacatgatcccgggctcccccggcagtacggagttagagggtggcttcagtcggcaacgcaagcgcaagttgtccttccgcaggcgcacggacaaggacacggagcagccaggggaggtgtcggccttggggccgggccgggcgggggcagggccgagtagccggggccggccgggggggccgtggggggagagcccgtccagtggcccctccagccctgagagcagtgaggatgagggcccaggccgcagctccagccccctccgcctggtgcccttctccagccccaggccccccggagagccgccgggtggggagcccctgatggaggactgcgagaagagcagcgacacttgcaaccccctgtcaggcgccttctcaggagtgtccaacattttcagcttctggggggacagtcggggccgccagtaccaggagctccctcgatgccccgcccccacccccagcctcctcaacatccccctctccagcccgggtcggcggccccggggcgacgtggagagcaggctggatgccctccagcgccagctcaacaggctggagacccggctgagtgcagacatggccactgtcctgcagctgctacagaggcagatgacgctggtcccgcccgcctacagtgctgtgaccaccccggggcctggccccacttccacatccccgctgttgcccgtcagccccctccccaccctcaccttggactcgctttctcaggtttcccagttcatggcgtgtgaggagctgcccccgggggccccagagcttccccaagaaggccccacacgacgcctctccctaccgggccagctgggggccctcacctcccagcccctgcacagacacggctcggacccgggcagttagtggggctgcccagtgtggacacgtggctcacccagggatcaaggcgctgctgggccgctccccttggaggccctgctcaggaggccctgaccgtggaaggggagaggaactcgaaagcacagctcctcccccagcccttgggaccatcttctcctgcagtcccctgggccccagtgagaggggcaggggcagggccggcagtaggtggggcctgtggtccccccactgccctgagggcattagctggtctaactgcccggaggcacccggccctgggccttaggcacctcaaggacttttctgctatttactgctcttattgttaaggataataattaaggatcatatgaataattaatgaagatgctgatgactatgaataataaataattatcctgaggaga

SEQ ID NO: 756 - DNA, 3884 bp, Homo sapiens
  source 1..3884: mol_type = genomic DNA
  misc_feature 1..3884: note = cDNA of KCNH2 gene SNP c.3061A>G (p.Ser1021Gly)
atgccggtgcggaggggccacgtcgcgccgcagaacaccttcctggacaccatcatccgcaagtttgagggccagagccgtaagttcatcatcgccaacgctcgggtggagaactgcgccgtcatctactgcaacgacggcttctgcgagctgtgcggctactcgcgggccgaggtgatgcagcgaccctgcacctgcgacttcctgcacgggccgcgcacgcagcgccgcgctgccgcgcagatcgcgcaggcactgctgggcgccgaggagcgcaaagtggaaatcgccttctaccggaaagatgggagctgcttcctatgtctggtggatgtggtgcccgtgaagaacgaggatggggctgtcatcatgttcatcctcaatttcgaggtggtgatggagaaggacatggtggggtccccggctcatgacaccaaccaccggggcccccccaccagctggctggccccaggccgcgccaagaccttccgcctgaagctgcccgcgctgctggcgctgacggcccgggagtcgtcggtgcggtcgggcggcgcgggcggcgcgggcgccccgggggccgtggtggtggacgtggacctgacgcccgcggcacccagcagcgagtcgctggccctggacgaagtgacagccatggacaaccacgtggcagggctcgggcccgcggaggagcggcgtgcgctggtgggtcccggctctccgccccgcagcgcgcccggccagctcccatcgccccgggcgcacagcctcaaccccgacgcctcgggctccagctgcagcctggcccggacgcgctcccgagaaagctgcgccagcgtgcgccgcgcctcgtcggccgacgacatcgaggccatgcgcgccggggtgctgcccccgccaccgcgccacgccagcaccggggccatgcacccactgcgcagcggcttgctcaactccacctcggactccgacctcgtgcgctaccgcaccattagcaagattccccaaatcaccctcaactttgtggacctcaagggcgaccccttcttggcttcgcccaccagtgaccgtgagatcatagcacctaagataaaggagcgaacccacaatgtcactgagaaggtcacccaggtcctgtccctgggcgccgacgtgctgcctgagtacaagctgcaggcaccgcgcatccaccgctggaccatcctgcattacagccccttcaaggccgtgtgggactggctcatcctgctgctggtcatctacacggctgtcttcacaccctactcggctgccttcctgctgaaggagacggaagaaggcccgcctgctaccgagtgtggctacgcctgccagccgctggctgtggtggacctcatcgtggacatcatgttcattgtggacatcctcatcaacttccgcaccacctacgtcaatgccaacgaggaggtggtcagccaccccggccgcatcgccgtccactacttcaagggctggttcctcatcgacatggtggccgccatccccttcgacctgctcatcttcggctctggctctgaggagctgatcgggctgctgaagactgcgcggctgctgcggctggtgcgcgtggcgcggaagctggatcgctactcagagtacggcgcggccgtgctgttcttgctcatgtgcacctttgcgctcatcgcgcactggctagcctgcatctggtacgccatcggcaacatggagcagccacacatggactcacgcatcggctggctgcacaacctgggcgaccagataggcaaaccctacaacagcagcggcctgggcggcccctccatcaaggacaagtatgtgacggcgctctacttcaccttcagcagcctcaccagtgtgggcttcggcaacgtctctcccaacaccaactcagagaagatcttctccatctgcgtcatgctcattggctccctcatgtatgctagcatcttcggcaacgtgtcggccatcatccagcggctgtactcgggcacagcccgctaccacacacagatgctgcgggtgcgggagttcatccgcttccaccagatccccaatcccctgcgccagcgcctcgaggagtacttccagcacgcctggtcctacaccaacggcatcgacatgaacgcggtgctgaagggcttccctgagtgcctgcaggctgacatctgcctgcacctgaaccgctcactgctgcagcactgcaaacccttccgaggggccaccaagggctgccttcgggccctggccatgaagttcaagaccacacatgcaccgccaggggacacactggtgcatgctggggacctgctcaccgccctgtacttcatctcccggggctccatcgagatcctgcggggcgacgtcgtcgtggccatcctggggaagaatgacatctttggggagcctctgaacctgtatgcaaggcctggcaagtcgaacggggatgtgcgggccctcacctactgtgacctacacaagatccatcgggacgacctgctggaggtgctggacatgtaccctgagttctccgaccacttctggtccagcctggagatcaccttcaacctgcgagataccaacatgatcccgggctcccccggcagtacggagttagagggtggcttcagtcggcaacgcaagcgcaagttgtccttccgcaggcgcacggacaaggacacggagcagccaggggaggtgtcggccttggggccgggccgggcgggggcagggccgagtagccggggccggccgggggggccgtggggggagagcccgtccagtggcccctccagccctgagagcagtgaggatgagggcccaggccgcagctccagccccctccgcctggtgcccttctccagccccaggccccccggagagccgccgggtggggagcccctgatggaggactgcgagaagagcagcgacacttgcaaccccctgtcaggcgccttctcaggagtgtccaacattttcagcttctggggggacagtcggggccgccagtaccaggagctccctcgatgccccgcccccacccccggcctcctcaacatccccctctccagcccgggtcggcggccccggggcgacgtggagagcaggctggatgccctccagcgccagctcaacaggctggagacccggctgagtgcagacatggccactgtcctgcagctgctacagaggcagatgacgctggtcccgcccgcctacagtgctgtgaccaccccggggcctggccccacttccacatccccgctgttgcccgtcagccccctccccaccctcaccttggactcgctttctcaggtttcccagttcatggcgtgtgaggagctgcccccgggggccccagagcttccccaagaaggccccacacgacgcctctccctaccgggccagctgggggccctcacctcccagcccctgcacagacacggctcggacccgggcagttagtggggctgcccagtgtggacacgtggctcacccagggatcaaggcgctgctgggccgctccccttggaggccctgctcaggaggccctgaccgtggaaggggagaggaactcgaaagcacagctcctcccccagcccttgggaccatcttctcctgcagtcccctgggccccagtgagaggggcaggggcagggccggcagtaggtggggcctgtggtccccccactgccctgagggcattagctggtctaactgcccggaggcacccggccctgggccttaggcacctcaaggacttttctgctatttactgctcttattgttaaggataataattaaggatcatatgaataattaatgaagatgctgatgactatgaataataaataattatcctgaggaga

SEQ ID NO: 757 - DNA, 3884 bp, Homo sapiens
  source 1..3884: mol_type = genomic DNA
  misc_feature 1..3884: note = cDNA of KCNH2 gene SNP c.3070A>T (p.Asn1024Tyr)
atgccggtgcggaggggccacgtcgcgccgcagaacaccttcctggacaccatcatccgcaagtttgagggccagagccgtaagttcatcatcgccaacgctcgggtggagaactgcgccgtcatctactgcaacgacggcttctgcgagctgtgcggctactcgcgggccgaggtgatgcagcgaccctgcacctgcgacttcctgcacgggccgcgcacgcagcgccgcgctgccgcgcagatcgcgcaggcactgctgggcgccgaggagcgcaaagtggaaatcgccttctaccggaaagatgggagctgcttcctatgtctggtggatgtggtgcccgtgaagaacgaggatggggctgtcatcatgttcatcctcaatttcgaggtggtgatggagaaggacatggtggggtccccggctcatgacaccaaccaccggggcccccccaccagctggctggccccaggccgcgccaagaccttccgcctgaagctgcccgcgctgctggcgctgacggcccgggagtcgtcggtgcggtcgggcggcgcgggcggcgcgggcgccccgggggccgtggtggtggacgtggacctgacgcccgcggcacccagcagcgagtcgctggccctggacgaagtgacagccatggacaaccacgtggcagggctcgggcccgcggaggagcggcgtgcgctggtgggtcccggctctccgccccgcagcgcgcccggccagctcccatcgccccgggcgcacagcctcaaccccgacgcctcgggctccagctgcagcctggcccggacgcgctcccgagaaagctgcgccagcgtgcgccgcgcctcgtcggccgacgacatcgaggccatgcgcgccggggtgctgcccccgccaccgcgccacgccagcaccggggccatgcacccactgcgcagcggcttgctcaactccacctcggactccgacctcgtgcgctaccgcaccattagcaagattccccaaatcaccctcaactttgtggacctcaagggcgaccccttcttggcttcgcccaccagtgaccgtgagatcatagcacctaagataaaggagcgaacccacaatgtcactgagaaggtcacccaggtcctgtccctgggcgccgacgtgctgcctgagtacaagctgcaggcaccgcgcatccaccgctggaccatcctgcattacagccccttcaaggccgtgtgggactggctcatcctgctgctggtcatctacacggctgtcttcacaccctactcggctgccttcctgctgaaggagacggaagaaggcccgcctgctaccgagtgtggctacgcctgccagccgctggctgtggtggacctcatcgtggacatcatgttcattgtggacatcctcatcaacttccgcaccacctacgtcaatgccaacgaggaggtggtcagccaccccggccgcatcgccgtccactacttcaagggctggttcctcatcgacatggtggccgccatccccttcgacctgctcatcttcggctctggctctgaggagctgatcgggctgctgaagactgcgcggctgctgcggctggtgcgcgtggcgcggaagctggatcgctactcagagtacggcgcggccgtgctgttcttgctcatgtgcacctttgcgctcatcgcgcactggctagcctgcatctggtacgccatcggcaacatggagcagccacacatggactcacgcatcggctggctgcacaacctgggcgaccagataggcaaaccctacaacagcagcggcctgggcggcccctccatcaaggacaagtatgtgacggcgctctacttcaccttcagcagcctcaccagtgtgggcttcggcaacgtctctcccaacaccaactcagagaagatcttctccatctgcgtcatgctcattggctccctcatgtatgctagcatcttcggcaacgtgtcggccatcatccagcggctgtactcgggcacagcccgctaccacacacagatgctgcgggtgcgggagttcatccgcttccaccagatccccaatcccctgcgccagcgcctcgaggagtacttccagcacgcctggtcctacaccaacggcatcgacatgaacgcggtgctgaagggcttccctgagtgcctgcaggctgacatctgcctgcacctgaaccgctcactgctgcagcactgcaaacccttccgaggggccaccaagggctgccttcgggccctggccatgaagttcaagaccacacatgcaccgccaggggacacactggtgcatgctggggacctgctcaccgccctgtacttcatctcccggggctccatcgagatcctgcggggcgacgtcgtcgtggccatcctggggaagaatgacatctttggggagcctctgaacctgtatgcaaggcctggcaagtcgaacggggatgtgcgggccctcacctactgtgacctacacaagatccatcgggacgacctgctggaggtgctggacatgtaccctgagttctccgaccacttctggtccagcctggagatcaccttcaacctgcgagataccaacatgatcccgggctcccccggcagtacggagttagagggtggcttcagtcggcaacgcaagcgcaagttgtccttccgcaggcgcacggacaaggacacggagcagccaggggaggtgtcggccttggggccgggccgggcgggggcagggccgagtagccggggccggccgggggggccgtggggggagagcccgtccagtggcccctccagccctgagagcagtgaggatgagggcccaggccgcagctccagccccctccgcctggtgcccttctccagccccaggccccccggagagccgccgggtggggagcccctgatggaggactgcgagaagagcagcgacacttgcaaccccctgtcaggcgccttctcaggagtgtccaacattttcagcttctggggggacagtcggggccgccagtaccaggagctccctcgatgccccgcccccacccccagcctcctctacatccccctctccagcccgggtcggcggccccggggcgacgtggagagcaggctggatgccctccagcgccagctcaacaggctggagacccggctgagtgcagacatggccactgtcctgcagctgctacagaggcagatgacgctggtcccgcccgcctacagtgctgtgaccaccccggggcctggccccacttccacatccccgctgttgcccgtcagccccctccccaccctcaccttggactcgctttctcaggtttcccagttcatggcgtgtgaggagctgcccccgggggccccagagcttccccaagaaggccccacacgacgcctctccctaccgggccagctgggggccctcacctcccagcccctgcacagacacggctcggacccgggcagttagtggggctgcccagtgtggacacgtggctcacccagggatcaaggcgctgctgggccgctccccttggaggccctgctcaggaggccctgaccgtggaaggggagaggaactcgaaagcacagctcctcccccagcccttgggaccatcttctcctgcagtcccctgggccccagtgagaggggcaggggcagggccggcagtaggtggggcctgtggtccccccactgccctgagggcattagctggtctaactgcccggaggcacccggccctgggccttaggcacctcaaggacttttctgctatttactgctcttattgttaaggataataattaaggatcatatgaataattaatgaagatgctgatgactatgaataataaataattatcctgaggaga

SEQ ID NO: 758 - DNA, 3884 bp, Homo sapiens
  source 1..3884: mol_type = genomic DNA
  misc_feature 1..3884: note = cDNA of KCNH2 gene SNP c.3079C>A (p.Leu1027Ile)
atgccggtgcggaggggccacgtcgcgccgcagaacaccttcctggacaccatcatccgcaagtttgagggccagagccgtaagttcatcatcgccaacgctcgggtggagaactgcgccgtcatctactgcaacgacggcttctgcgagctgtgcggctactcgcgggccgaggtgatgcagcgaccctgcacctgcgacttcctgcacgggccgcgcacgcagcgccgcgctgccgcgcagatcgcgcaggcactgctgggcgccgaggagcgcaaagtggaaatcgccttctaccggaaagatgggagctgcttcctatgtctggtggatgtggtgcccgtgaagaacgaggatggggctgtcatcatgttcatcctcaatttcgaggtggtgatggagaaggacatggtggggtccccggctcatgacaccaaccaccggggcccccccaccagctggctggccccaggccgcgccaagaccttccgcctgaagctgcccgcgctgctggcgctgacggcccgggagtcgtcggtgcggtcgggcggcgcgggcggcgcgggcgccccgggggccgtggtggtggacgtggacctgacgcccgcggcacccagcagcgagtcgctggccctggacgaagtgacagccatggacaaccacgtggcagggctcgggcccgcggaggagcggcgtgcgctggtgggtcccggctctccgccccgcagcgcgcccggccagctcccatcgccccgggcgcacagcctcaaccccgacgcctcgggctccagctgcagcctggcccggacgcgctcccgagaaagctgcgccagcgtgcgccgcgcctcgtcggccgacgacatcgaggccatgcgcgccggggtgctgcccccgccaccgcgccacgccagcaccggggccatgcacccactgcgcagcggcttgctcaactccacctcggactccgacctcgtgcgctaccgcaccattagcaagattccccaaatcaccctcaactttgtggacctcaagggcgaccccttcttggcttcgcccaccagtgaccgtgagatcatagcacctaagataaaggagcgaacccacaatgtcactgagaaggtcacccaggtcctgtccctgggcgccgacgtgctgcctgagtacaagctgcaggcaccgcgcatccaccgctggaccatcctgcattacagccccttcaaggccgtgtgggactggctcatcctgctgctggtcatctacacggctgtcttcacaccctactcggctgccttcctgctgaaggagacggaagaaggcccgcctgctaccgagtgtggctacgcctgccagccgctggctgtggtggacctcatcgtggacatcatgttcattgtggacatcctcatcaacttccgcaccacctacgtcaatgccaacgaggaggtggtcagccaccccggccgcatcgccgtccactacttcaagggctggttcctcatcgacatggtggccgccatccccttcgacctgctcatcttcggctctggctctgaggagctgatcgggctgctgaagactgcgcggctgctgcggctggtgcgcgtggcgcggaagctggatcgctactcagagtacggcgcggccgtgctgttcttgctcatgtgcacctttgcgctcatcgcgcactggctagcctgcatctggtacgccatcggcaacatggagcagccacacatggactcacgcatcggctggctgcacaacctgggcgaccagataggcaaaccctacaacagcagcggcctgggcggcccctccatcaaggacaagtatgtgacggcgctctacttcaccttcagcagcctcaccagtgtgggcttcggcaacgtctctcccaacaccaactcagagaagatcttctccatctgcgtcatgctcattggctccctcatgtatgctagcatcttcggcaacgtgtcggccatcatccagcggctgtactcgggcacagcccgctaccacacacagatgctgcgggtgcgggagttcatccgcttccaccagatccccaatcccctgcgccagcgcctcgaggagtacttccagcacgcctggtcctacaccaacggcatcgacatgaacgcggtgctgaagggcttccctgagtgcctgcaggctgacatctgcctgcacctgaaccgctcactgctgcagcactgcaaacccttccgaggggccaccaagggctgccttcgggccctggccatgaagttcaagaccacacatgcaccgccaggggacacactggtgcatgctggggacctgctcaccgccctgtacttcatctcccggggctccatcgagatcctgcggggcgacgtcgtcgtggccatcctggggaagaatgacatctttggggagcctctgaacctgtatgcaaggcctggcaagtcgaacggggatgtgcgggccctcacctactgtgacctacacaagatccatcgggacgacctgctggaggtgctggacatgtaccctgagttctccgaccacttctggtccagcctggagatcaccttcaacctgcgagataccaacatgatcccgggctcccccggcagtacggagttagagggtggcttcagtcggcaacgcaagcgcaagttgtccttccgcaggcgcacggacaaggacacggagcagccaggggaggtgtcggccttggggccgggccgggcgggggcagggccgagtagccggggccggccgggggggccgtggggggagagcccgtccagtggcccctccagccctgagagcagtgaggatgagggcccaggccgcagctccagccccctccgcctggtgcccttctccagccccaggccccccggagagccgccgggtggggagcccctgatggaggactgcgagaagagcagcgacacttgcaaccccctgtcaggcgccttctcaggagtgtccaacattttcagcttctggggggacagtcggggccgccagtaccaggagctccctcgatgccccgcccccacccccagcctcctcaacatccccatctccagcccgggtcggcggccccggggcgacgtggagagcaggctggatgccctccagcgccagctcaacaggctggagacccggctgagtgcagacatggccactgtcctgcagctgctacagaggcagatgacgctggtcccgcccgcctacagtgctgtgaccaccccggggcctggccccacttccacatccccgctgttgcccgtcagccccctccccaccctcaccttggactcgctttctcaggtttcccagttcatggcgtgtgaggagctgcccccgggggccccagagcttccccaagaaggccccacacgacgcctctccctaccgggccagctgggggccctcacctcccagcccctgcacagacacggctcggacccgggcagttagtggggctgcccagtgtggacacgtggctcacccagggatcaaggcgctgctgggccgctccccttggaggccctgctcaggaggccctgaccgtggaaggggagaggaactcgaaagcacagctcctcccccagcccttgggaccatcttctcctgcagtcccctgggccccagtgagaggggcaggggcagggccggcagtaggtggggcctgtggtccccccactgccctgagggcattagctggtctaactgcccggaggcacccggccctgggccttaggcacctcaaggacttttctgctatttactgctcttattgttaaggataataattaaggatcatatgaataattaatgaagatgctgatgactatgaataataaataattatcctgaggaga

SEQ ID NO: 759 - DNA, 3884 bp, Homo sapiens
  source 1..3884: mol_type = genomic DNA
  misc_feature 1..3884: note = cDNA of KCNH2 gene SNP c.3089C>G (p.Pro1030Arg)
atgccggtgcggaggggccacgtcgcgccgcagaacaccttcctggacaccatcatccgcaagtttgagggccagagccgtaagttcatcatcgccaacgctcgggtggagaactgcgccgtcatctactgcaacgacggcttctgcgagctgtgcggctactcgcgggccgaggtgatgcagcgaccctgcacctgcgacttcctgcacgggccgcgcacgcagcgccgcgctgccgcgcagatcgcgcaggcactgctgggcgccgaggagcgcaaagtggaaatcgccttctaccggaaagatgggagctgcttcctatgtctggtggatgtggtgcccgtgaagaacgaggatggggctgtcatcatgttcatcctcaatttcgaggtggtgatggagaaggacatggtggggtccccggctcatgacaccaaccaccggggcccccccaccagctggctggccccaggccgcgccaagaccttccgcctgaagctgcccgcgctgctggcgctgacggcccgggagtcgtcggtgcggtcgggcggcgcgggcggcgcgggcgccccgggggccgtggtggtggacgtggacctgacgcccgcggcacccagcagcgagtcgctggccctggacgaagtgacagccatggacaaccacgtggcagggctcgggcccgcggaggagcggcgtgcgctggtgggtcccggctctccgccccgcagcgcgcccggccagctcccatcgccccgggcgcacagcctcaaccccgacgcctcgggctccagctgcagcctggcccggacgcgctcccgagaaagctgcgccagcgtgcgccgcgcctcgtcggccgacgacatcgaggccatgcgcgccggggtgctgcccccgccaccgcgccacgccagcaccggggccatgcacccactgcgcagcggcttgctcaactccacctcggactccgacctcgtgcgctaccgcaccattagcaagattccccaaatcaccctcaactttgtggacctcaagggcgaccccttcttggcttcgcccaccagtgaccgtgagatcatagcacctaagataaaggagcgaacccacaatgtcactgagaaggtcacccaggtcctgtccctgggcgccgacgtgctgcctgagtacaagctgcaggcaccgcgcatccaccgctggaccatcctgcattacagccccttcaaggccgtgtgggactggctcatcctgctgctggtcatctacacggctgtcttcacaccctactcggctgccttcctgctgaaggagacggaagaaggcccgcctgctaccgagtgtggctacgcctgccagccgctggctgtggtggacctcatcgtggacatcatgttcattgtggacatcctcatcaacttccgcaccacctacgtcaatgccaacgaggaggtggtcagccaccccggccgcatcgccgtccactacttcaagggctggttcctcatcgacatggtggccgccatccccttcgacctgctcatcttcggctctggctctgaggagctgatcgggctgctgaagactgcgcggctgctgcggctggtgcgcgtggcgcggaagctggatcgctactcagagtacggcgcggccgtgctgttcttgctcatgtgcacctttgcgctcatcgcgcactggctagcctgcatctggtacgccatcggcaacatggagcagccacacatggactcacgcatcggctggctgcacaacctgggcgaccagataggcaaaccctacaacagcagcggcctgggcggcccctccatcaaggacaagtatgtgacggcgctctacttcaccttcagcagcctcaccagtgtgggcttcggcaacgtctctcccaacaccaactcagagaagatcttctccatctgcgtcatgctcattggctccctcatgtatgctagcatcttcggcaacgtgtcggccatcatccagcggctgtactcgggcacagcccgctaccacacacagatgctgcgggtgcgggagttcatccgcttccaccagatccccaatcccctgcgccagcgcctcgaggagtacttccagcacgcctggtcctacaccaacggcatcgacatgaacgcggtgctgaagggcttccctgagtgcctgcaggctgacatctgcctgcacctgaaccgctcactgctgcagcactgcaaacccttccgaggggccaccaagggctgccttcgggccctggccatgaagttcaagaccacacatgcaccgccaggggacacactggtgcatgctggggacctgctcaccgccctgtacttcatctcccggggctccatcgagatcctgcggggcgacgtcgtcgtggccatcctggggaagaatgacatctttggggagcctctgaacctgtatgcaaggcctggcaagtcgaacggggatgtgcgggccctcacctactgtgacctacacaagatccatcgggacgacctgctggaggtgctggacatgtaccctgagttctccgaccacttctggtccagcctggagatcaccttcaacctgcgagataccaacatgatcccgggctcccccggcagtacggagttagagggtggcttcagtcggcaacgcaagcgcaagttgtccttccgcaggcgcacggacaaggacacggagcagccaggggaggtgtcggccttggggccgggccgggcgggggcagggccgagtagccggggccggccgggggggccgtggggggagagcccgtccagtggcccctccagccctgagagcagtgaggatgagggcccaggccgcagctccagccccctccgcctggtgcccttctccagccccaggccccccggagagccgccgggtggggagcccctgatggaggactgcgagaagagcagcgacacttgcaaccccctgtcaggcgccttctcaggagtgtccaacattttcagcttctggggggacagtcggggccgccagtaccaggagctccctcgatgccccgcccccacccccagcctcctcaacatccccctctccagccggggtcggcggccccggggcgacgtggagagcaggctggatgccctccagcgccagctcaacaggctggagacccggctgagtgcagacatggccactgtcctgcagctgctacagaggcagatgacgctggtcccgcccgcctacagtgctgtgaccaccccggggcctggccccacttccacatccccgctgttgcccgtcagccccctccccaccctcaccttggactcgctttctcaggtttcccagttcatggcgtgtgaggagctgcccccgggggccccagagcttccccaagaaggccccacacgacgcctctccctaccgggccagctgggggccctcacctcccagcccctgcacagacacggctcggacccgggcagttagtggggctgcccagtgtggacacgtggctcacccagggatcaaggcgctgctgggccgctccccttggaggccctgctcaggaggccctgaccgtggaaggggagaggaactcgaaagcacagctcctcccccagcccttgggaccatcttctcctgcagtcccctgggccccagtgagaggggcaggggcagggccggcagtaggtggggcctgtggtccccccactgccctgagggcattagctggtctaactgcccggaggcacccggccctgggccttaggcacctcaaggacttttctgctatttactgctcttattgttaaggataataattaaggatcatatgaataattaatgaagatgctgatgactatgaataataaataattatcctgaggaga

SEQ ID NO: 760 - DNA, 3884 bp, Homo sapiens
  source 1..3884: mol_type = genomic DNA
  misc_feature 1..3884: note = cDNA of KCNH2 gene SNP c.3089C>T (p.Pro1030Leu)
atgccggtgcggaggggccacgtcgcgccgcagaacaccttcctggacaccatcatccgcaagtttgagggccagagccgtaagttcatcatcgccaacgctcgggtggagaactgcgccgtcatctactgcaacgacggcttctgcgagctgtgcggctactcgcgggccgaggtgatgcagcgaccctgcacctgcgacttcctgcacgggccgcgcacgcagcgccgcgctgccgcgcagatcgcgcaggcactgctgggcgccgaggagcgcaaagtggaaatcgccttctaccggaaagatgggagctgcttcctatgtctggtggatgtggtgcccgtgaagaacgaggatggggctgtcatcatgttcatcctcaatttcgaggtggtgatggagaaggacatggtggggtccccggctcatgacaccaaccaccggggcccccccaccagctggctggccccaggccgcgccaagaccttccgcctgaagctgcccgcgctgctggcgctgacggcccgggagtcgtcggtgcggtcgggcggcgcgggcggcgcgggcgccccgggggccgtggtggtggacgtggacctgacgcccgcggcacccagcagcgagtcgctggccctggacgaagtgacagccatggacaaccacgtggcagggctcgggcccgcggaggagcggcgtgcgctggtgggtcccggctctccgccccgcagcgcgcccggccagctcccatcgccccgggcgcacagcctcaaccccgacgcctcgggctccagctgcagcctggcccggacgcgctcccgagaaagctgcgccagcgtgcgccgcgcctcgtcggccgacgacatcgaggccatgcgcgccggggtgctgcccccgccaccgcgccacgccagcaccggggccatgcacccactgcgcagcggcttgctcaactccacctcggactccgacctcgtgcgctaccgcaccattagcaagattccccaaatcaccctcaactttgtggacctcaagggcgaccccttcttggcttcgcccaccagtgaccgtgagatcatagcacctaagataaaggagcgaacccacaatgtcactgagaaggtcacccaggtcctgtccctgggcgccgacgtgctgcctgagtacaagctgcaggcaccgcgcatccaccgctggaccatcctgcattacagccccttcaaggccgtgtgggactggctcatcctgctgctggtcatctacacggctgtcttcacaccctactcggctgccttcctgctgaaggagacggaagaaggcccgcctgctaccgagtgtggctacgcctgccagccgctggctgtggtggacctcatcgtggacatcatgttcattgtggacatcctcatcaacttccgcaccacctacgtcaatgccaacgaggaggtggtcagccaccccggccgcatcgccgtccactacttcaagggctggttcctcatcgacatggtggccgccatccccttcgacctgctcatcttcggctctggctctgaggagctgatcgggctgctgaagactgcgcggctgctgcggctggtgcgcgtggcgcggaagctggatcgctactcagagtacggcgcggccgtgctgttcttgctcatgtgcacctttgcgctcatcgcgcactggctagcctgcatctggtacgccatcggcaacatggagcagccacacatggactcacgcatcggctggctgcacaacctgggcgaccagataggcaaaccctacaacagcagcggcctgggcggcccctccatcaaggacaagtatgtgacggcgctctacttcaccttcagcagcctcaccagtgtgggcttcggcaacgtctctcccaacaccaactcagagaagatcttctccatctgcgtcatgctcattggctccctcatgtatgctagcatcttcggcaacgtgtcggccatcatccagcggctgtactcgggcacagcccgctaccacacacagatgctgcgggtgcgggagttcatccgcttccaccagatccccaatcccctgcgccagcgcctcgaggagtacttccagcacgcctggtcctacaccaacggcatcgacatgaacgcggtgctgaagggcttccctgagtgcctgcaggctgacatctgcctgcacctgaaccgctcactgctgcagcactgcaaacccttccgaggggccaccaagggctgccttcgggccctggccatgaagttcaagaccacacatgcaccgccaggggacacactggtgcatgctggggacctgctcaccgccctgtacttcatctcccggggctccatcgagatcctgcggggcgacgtcgtcgtggccatcctggggaagaatgacatctttggggagcctctgaacctgtatgcaaggcctggcaagtcgaacggggatgtgcgggccctcacctactgtgacctacacaagatccatcgggacgacctgctggaggtgctggacatgtaccctgagttctccgaccacttctggtccagcctggagatcaccttcaacctgcgagataccaacatgatcccgggctcccccggcagtacggagttagagggtggcttcagtcggcaacgcaagcgcaagttgtccttccgcaggcgcacggacaaggacacggagcagccaggggaggtgtcggccttggggccgggccgggcgggggcagggccgagtagccggggccggccgggggggccgtggggggagagcccgtccagtggcccctccagccctgagagcagtgaggatgagggcccaggccgcagctccagccccctccgcctggtgcccttctccagccccaggccccccggagagccgccgggtggggagcccctgatggaggactgcgagaagagcagcgacacttgcaaccccctgtcaggcgccttctcaggagtgtccaacattttcagcttctggggggacagtcggggccgccagtaccaggagctccctcgatgccccgcccccacccccagcctcctcaacatccccctctccagcctgggtcggcggccccggggcgacgtggagagcaggctggatgccctccagcgccagctcaacaggctggagacccggctgagtgcagacatggccactgtcctgcagctgctacagaggcagatgacgctggtcccgcccgcctacagtgctgtgaccaccccggggcctggccccacttccacatccccgctgttgcccgtcagccccctccccaccctcaccttggactcgctttctcaggtttcccagttcatggcgtgtgaggagctgcccccgggggccccagagcttccccaagaaggccccacacgacgcctctccctaccgggccagctgggggccctcacctcccagcccctgcacagacacggctcggacccgggcagttagtggggctgcccagtgtggacacgtggctcacccagggatcaaggcgctgctgggccgctccccttggaggccctgctcaggaggccctgaccgtggaaggggagaggaactcgaaagcacagctcctcccccagcccttgggaccatcttctcctgcagtcccctgggccccagtgagaggggcaggggcagggccggcagtaggtggggcctgtggtccccccactgccctgagggcattagctggtctaactgcccggaggcacccggccctgggccttaggcacctcaaggacttttctgctatttactgctcttattgttaaggataataattaaggatcatatgaataattaatgaagatgctgatgactatgaataataaataattatcctgaggaga

SEQ ID NO: 761 - DNA, 3884 bp, Homo sapiens
  source 1..3884: mol_type = genomic DNA
  misc_feature 1..3884: note = cDNA of KCNH2 gene SNP c.3092G>A (p.Gly1031Asp)
atgccggtgcggaggggccacgtcgcgccgcagaacaccttcctggacaccatcatccgcaagtttgagggccagagccgtaagttcatcatcgccaacgctcgggtggagaactgcgccgtcatctactgcaacgacggcttctgcgagctgtgcggctactcgcgggccgaggtgatgcagcgaccctgcacctgcgacttcctgcacgggccgcgcacgcagcgccgcgctgccgcgcagatcgcgcaggcactgctgggcgccgaggagcgcaaagtggaaatcgccttctaccggaaagatgggagctgcttcctatgtctggtggatgtggtgcccgtgaagaacgaggatggggctgtcatcatgttcatcctcaatttcgaggtggtgatggagaaggacatggtggggtccccggctcatgacaccaaccaccggggcccccccaccagctggctggccccaggccgcgccaagaccttccgcctgaagctgcccgcgctgctggcgctgacggcccgggagtcgtcggtgcggtcgggcggcgcgggcggcgcgggcgccccgggggccgtggtggtggacgtggacctgacgcccgcggcacccagcagcgagtcgctggccctggacgaagtgacagccatggacaaccacgtggcagggctcgggcccgcggaggagcggcgtgcgctggtgggtcccggctctccgccccgcagcgcgcccggccagctcccatcgccccgggcgcacagcctcaaccccgacgcctcgggctccagctgcagcctggcccggacgcgctcccgagaaagctgcgccagcgtgcgccgcgcctcgtcggccgacgacatcgaggccatgcgcgccggggtgctgcccccgccaccgcgccacgccagcaccggggccatgcacccactgcgcagcggcttgctcaactccacctcggactccgacctcgtgcgctaccgcaccattagcaagattccccaaatcaccctcaactttgtggacctcaagggcgaccccttcttggcttcgcccaccagtgaccgtgagatcatagcacctaagataaaggagcgaacccacaatgtcactgagaaggtcacccaggtcctgtccctgggcgccgacgtgctgcctgagtacaagctgcaggcaccgcgcatccaccgctggaccatcctgcattacagccccttcaaggccgtgtgggactggctcatcctgctgctggtcatctacacggctgtcttcacaccctactcggctgccttcctgctgaaggagacggaagaaggcccgcctgctaccgagtgtggctacgcctgccagccgctggctgtggtggacctcatcgtggacatcatgttcattgtggacatcctcatcaacttccgcaccacctacgtcaatgccaacgaggaggtggtcagccaccccggccgcatcgccgtccactacttcaagggctggttcctcatcgacatggtggccgccatccccttcgacctgctcatcttcggctctggctctgaggagctgatcgggctgctgaagactgcgcggctgctgcggctggtgcgcgtggcgcggaagctggatcgctactcagagtacggcgcggccgtgctgttcttgctcatgtgcacctttgcgctcatcgcgcactggctagcctgcatctggtacgccatcggcaacatggagcagccacacatggactcacgcatcggctggctgcacaacctgggcgaccagataggcaaaccctacaacagcagcggcctgggcggcccctccatcaaggacaagtatgtgacggcgctctacttcaccttcagcagcctcaccagtgtgggcttcggcaacgtctctcccaacaccaactcagagaagatcttctccatctgcgtcatgctcattggctccctcatgtatgctagcatcttcggcaacgtgtcggccatcatccagcggctgtactcgggcacagcccgctaccacacacagatgctgcgggtgcgggagttcatccgcttccaccagatccccaatcccctgcgccagcgcctcgaggagtacttccagcacgcctggtcctacaccaacggcatcgacatgaacgcggtgctgaagggcttccctgagtgcctgcaggctgacatctgcctgcacctgaaccgctcactgctgcagcactgcaaacccttccgaggggccaccaagggctgccttcgggccctggccatgaagttcaagaccacacatgcaccgccaggggacacactggtgcatgctggggacctgctcaccgccctgtacttcatctcccggggctccatcgagatcctgcggggcgacgtcgtcgtggccatcctggggaagaatgacatctttggggagcctctgaacctgtatgcaaggcctggcaagtcgaacggggatgtgcgggccctcacctactgtgacctacacaagatccatcgggacgacctgctggaggtgctggacatgtaccctgagttctccgaccacttctggtccagcctggagatcaccttcaacctgcgagataccaacatgatcccgggctcccccggcagtacggagttagagggtggcttcagtcggcaacgcaagcgcaagttgtccttccgcaggcgcacggacaaggacacggagcagccaggggaggtgtcggccttggggccgggccgggcgggggcagggccgagtagccggggccggccgggggggccgtggggggagagcccgtccagtggcccctccagccctgagagcagtgaggatgagggcccaggccgcagctccagccccctccgcctggtgcccttctccagccccaggccccccggagagccgccgggtggggagcccctgatggaggactgcgagaagagcagcgacacttgcaaccccctgtcaggcgccttctcaggagtgtccaacattttcagcttctggggggacagtcggggccgccagtaccaggagctccctcgatgccccgcccccacccccagcctcctcaacatccccctctccagcccggatcggcggccccggggcgacgtggagagcaggctggatgccctccagcgccagctcaacaggctggagacccggctgagtgcagacatggccactgtcctgcagctgctacagaggcagatgacgctggtcccgcccgcctacagtgctgtgaccaccccggggcctggccccacttccacatccccgctgttgcccgtcagccccctccccaccctcaccttggactcgctttctcaggtttcccagttcatggcgtgtgaggagctgcccccgggggccccagagcttccccaagaaggccccacacgacgcctctccctaccgggccagctgggggccctcacctcccagcccctgcacagacacggctcggacccgggcagttagtggggctgcccagtgtggacacgtggctcacccagggatcaaggcgctgctgggccgctccccttggaggccctgctcaggaggccctgaccgtggaaggggagaggaactcgaaagcacagctcctcccccagcccttgggaccatcttctcctgcagtcccctgggccccagtgagaggggcaggggcagggccggcagtaggtggggcctgtggtccccccactgccctgagggcattagctggtctaactgcccggaggcacccggccctgggccttaggcacctcaaggacttttctgctatttactgctcttattgttaaggataataattaaggatcatatgaataattaatgaagatgctgatgactatgaataataaataattatcctgaggaga

SEQ ID NO: 762 - DNA, 3884 bp, Homo sapiens
  source 1..3884: mol_type = genomic DNA
  misc_feature 1..3884: note = cDNA of KCNH2 gene SNP c.3094C>T (p.Arg1032Trp)
atgccggtgcggaggggccacgtcgcgccgcagaacaccttcctggacaccatcatccgcaagtttgagggccagagccgtaagttcatcatcgccaacgctcgggtggagaactgcgccgtcatctactgcaacgacggcttctgcgagctgtgcggctactcgcgggccgaggtgatgcagcgaccctgcacctgcgacttcctgcacgggccgcgcacgcagcgccgcgctgccgcgcagatcgcgcaggcactgctgggcgccgaggagcgcaaagtggaaatcgccttctaccggaaagatgggagctgcttcctatgtctggtggatgtggtgcccgtgaagaacgaggatggggctgtcatcatgttcatcctcaatttcgaggtggtgatggagaaggacatggtggggtccccggctcatgacaccaaccaccggggcccccccaccagctggctggccccaggccgcgccaagaccttccgcctgaagctgcccgcgctgctggcgctgacggcccgggagtcgtcggtgcggtcgggcggcgcgggcggcgcgggcgccccgggggccgtggtggtggacgtggacctgacgcccgcggcacccagcagcgagtcgctggccctggacgaagtgacagccatggacaaccacgtggcagggctcgggcccgcggaggagcggcgtgcgctggtgggtcccggctctccgccccgcagcgcgcccggccagctcccatcgccccgggcgcacagcctcaaccccgacgcctcgggctccagctgcagcctggcccggacgcgctcccgagaaagctgcgccagcgtgcgccgcgcctcgtcggccgacgacatcgaggccatgcgcgccggggtgctgcccccgccaccgcgccacgccagcaccggggccatgcacccactgcgcagcggcttgctcaactccacctcggactccgacctcgtgcgctaccgcaccattagcaagattccccaaatcaccctcaactttgtggacctcaagggcgaccccttcttggcttcgcccaccagtgaccgtgagatcatagcacctaagataaaggagcgaacccacaatgtcactgagaaggtcacccaggtcctgtccctgggcgccgacgtgctgcctgagtacaagctgcaggcaccgcgcatccaccgctggaccatcctgcattacagccccttcaaggccgtgtgggactggctcatcctgctgctggtcatctacacggctgtcttcacaccctactcggctgccttcctgctgaaggagacggaagaaggcccgcctgctaccgagtgtggctacgcctgccagccgctggctgtggtggacctcatcgtggacatcatgttcattgtggacatcctcatcaacttccgcaccacctacgtcaatgccaacgaggaggtggtcagccaccccggccgcatcgccgtccactacttcaagggctggttcctcatcgacatggtggccgccatccccttcgacctgctcatcttcggctctggctctgaggagctgatcgggctgctgaagactgcgcggctgctgcggctggtgcgcgtggcgcggaagctggatcgctactcagagtacggcgcggccgtgctgttcttgctcatgtgcacctttgcgctcatcgcgcactggctagcctgcatctggtacgccatcggcaacatggagcagccacacatggactcacgcatcggctggctgcacaacctgggcgaccagataggcaaaccctacaacagcagcggcctgggcggcccctccatcaaggacaagtatgtgacggcgctctacttcaccttcagcagcctcaccagtgtgggcttcggcaacgtctctcccaacaccaactcagagaagatcttctccatctgcgtcatgctcattggctccctcatgtatgctagcatcttcggcaacgtgtcggccatcatccagcggctgtactcgggcacagcccgctaccacacacagatgctgcgggtgcgggagttcatccgcttccaccagatccccaatcccctgcgccagcgcctcgaggagtacttccagcacgcctggtcctacaccaacggcatcgacatgaacgcggtgctgaagggcttccctgagtgcctgcaggctgacatctgcctgcacctgaaccgctcactgctgcagcactgcaaacccttccgaggggccaccaagggctgccttcgggccctggccatgaagttcaagaccacacatgcaccgccaggggacacactggtgcatgctggggacctgctcaccgccctgtacttcatctcccggggctccatcgagatcctgcggggcgacgtcgtcgtggccatcctggggaagaatgacatctttggggagcctctgaacctgtatgcaaggcctggcaagtcgaacggggatgtgcgggccctcacctactgtgacctacacaagatccatcgggacgacctgctggaggtgctggacatgtaccctgagttctccgaccacttctggtccagcctggagatcaccttcaacctgcgagataccaacatgatcccgggctcccccggcagtacggagttagagggtggcttcagtcggcaacgcaagcgcaagttgtccttccgcaggcgcacggacaaggacacggagcagccaggggaggtgtcggccttggggccgggccgggcgggggcagggccgagtagccggggccggccgggggggccgtggggggagagcccgtccagtggcccctccagccctgagagcagtgaggatgagggcccaggccgcagctccagccccctccgcctggtgcccttctccagccccaggccccccggagagccgccgggtggggagcccctgatggaggactgcgagaagagcagcgacacttgcaaccccctgtcaggcgccttctcaggagtgtccaacattttcagcttctggggggacagtcggggccgccagtaccaggagctccctcgatgccccgcccccacccccagcctcctcaacatccccctctccagcccgggttggcggccccggggcgacgtggagagcaggctggatgccctccagcgccagctcaacaggctggagacccggctgagtgcagacatggccactgtcctgcagctgctacagaggcagatgacgctggtcccgcccgcctacagtgctgtgaccaccccggggcctggccccacttccacatccccgctgttgcccgtcagccccctccccaccctcaccttggactcgctttctcaggtttcccagttcatggcgtgtgaggagctgcccccgggggccccagagcttccccaagaaggccccacacgacgcctctccctaccgggccagctgggggccctcacctcccagcccctgcacagacacggctcggacccgggcagttagtggggctgcccagtgtggacacgtggctcacccagggatcaaggcgctgctgggccgctccccttggaggccctgctcaggaggccctgaccgtggaaggggagaggaactcgaaagcacagctcctcccccagcccttgggaccatcttctcctgcagtcccctgggccccagtgagaggggcaggggcagggccggcagtaggtggggcctgtggtccccccactgccctgagggcattagctggtctaactgcccggaggcacccggccctgggccttaggcacctcaaggacttttctgctatttactgctcttattgttaaggataataattaaggatcatatgaataattaatgaagatgctgatgactatgaataataaataattatcctgaggaga

SEQ ID NO: 763 - DNA, 3884 bp, Homo sapiens
  source 1..3884: mol_type = genomic DNA
  misc_feature 1..3884: note = cDNA of KCNH2 gene SNP c.3095G>A (p.Arg1032Gln)
atgccggtgcggaggggccacgtcgcgccgcagaacaccttcctggacaccatcatccgcaagtttgagggccagagccgtaagttcatcatcgccaacgctcgggtggagaactgcgccgtcatctactgcaacgacggcttctgcgagctgtgcggctactcgcgggccgaggtgatgcagcgaccctgcacctgcgacttcctgcacgggccgcgcacgcagcgccgcgctgccgcgcagatcgcgcaggcactgctgggcgccgaggagcgcaaagtggaaatcgccttctaccggaaagatgggagctgcttcctatgtctggtggatgtggtgcccgtgaagaacgaggatggggctgtcatcatgttcatcctcaatttcgaggtggtgatggagaaggacatggtggggtccccggctcatgacaccaaccaccggggcccccccaccagctggctggccccaggccgcgccaagaccttccgcctgaagctgcccgcgctgctggcgctgacggcccgggagtcgtcggtgcggtcgggcggcgcgggcggcgcgggcgccccgggggccgtggtggtggacgtggacctgacgcccgcggcacccagcagcgagtcgctggccctggacgaagtgacagccatggacaaccacgtggcagggctcgggcccgcggaggagcggcgtgcgctggtgggtcccggctctccgccccgcagcgcgcccggccagctcccatcgccccgggcgcacagcctcaaccccgacgcctcgggctccagctgcagcctggcccggacgcgctcccgagaaagctgcgccagcgtgcgccgcgcctcgtcggccgacgacatcgaggccatgcgcgccggggtgctgcccccgccaccgcgccacgccagcaccggggccatgcacccactgcgcagcggcttgctcaactccacctcggactccgacctcgtgcgctaccgcaccattagcaagattccccaaatcaccctcaactttgtggacctcaagggcgaccccttcttggcttcgcccaccagtgaccgtgagatcatagcacctaagataaaggagcgaacccacaatgtcactgagaaggtcacccaggtcctgtccctgggcgccgacgtgctgcctgagtacaagctgcaggcaccgcgcatccaccgctggaccatcctgcattacagccccttcaaggccgtgtgggactggctcatcctgctgctggtcatctacacggctgtcttcacaccctactcggctgccttcctgctgaaggagacggaagaaggcccgcctgctaccgagtgtggctacgcctgccagccgctggctgtggtggacctcatcgtggacatcatgttcattgtggacatcctcatcaacttccgcaccacctacgtcaatgccaacgaggaggtggtcagccaccccggccgcatcgccgtccactacttcaagggctggttcctcatcgacatggtggccgccatccccttcgacctgctcatcttcggctctggctctgaggagctgatcgggctgctgaagactgcgcggctgctgcggctggtgcgcgtggcgcggaagctggatcgctactcagagtacggcgcggccgtgctgttcttgctcatgtgcacctttgcgctcatcgcgcactggctagcctgcatctggtacgccatcggcaacatggagcagccacacatggactcacgcatcggctggctgcacaacctgggcgaccagataggcaaaccctacaacagcagcggcctgggcggcccctccatcaaggacaagtatgtgacggcgctctacttcaccttcagcagcctcaccagtgtgggcttcggcaacgtctctcccaacaccaactcagagaagatcttctccatctgcgtcatgctcattggctccctcatgtatgctagcatcttcggcaacgtgtcggccatcatccagcggctgtactcgggcacagcccgctaccacacacagatgctgcgggtgcgggagttcatccgcttccaccagatccccaatcccctgcgccagcgcctcgaggagtacttccagcacgcctggtcctacaccaacggcatcgacatgaacgcggtgctgaagggcttccctgagtgcctgcaggctgacatctgcctgcacctgaaccgctcactgctgcagcactgcaaacccttccgaggggccaccaagggctgccttcgggccctggccatgaagttcaagaccacacatgcaccgccaggggacacactggtgcatgctggggacctgctcaccgccctgtacttcatctcccggggctccatcgagatcctgcggggcgacgtcgtcgtggccatcctggggaagaatgacatctttggggagcctctgaacctgtatgcaaggcctggcaagtcgaacggggatgtgcgggccctcacctactgtgacctacacaagatccatcgggacgacctgctggaggtgctggacatgtaccctgagttctccgaccacttctggtccagcctggagatcaccttcaacctgcgagataccaacatgatcccgggctcccccggcagtacggagttagagggtggcttcagtcggcaacgcaagcgcaagttgtccttccgcaggcgcacggacaaggacacggagcagccaggggaggtgtcggccttggggccgggccgggcgggggcagggccgagtagccggggccggccgggggggccgtggggggagagcccgtccagtggcccctccagccctgagagcagtgaggatgagggcccaggccgcagctccagccccctccgcctggtgcccttctccagccccaggccccccggagagccgccgggtggggagcccctgatggaggactgcgagaagagcagcgacacttgcaaccccctgtcaggcgccttctcaggagtgtccaacattttcagcttctggggggacagtcggggccgccagtaccaggagctccctcgatgccccgcccccacccccagcctcctcaacatccccctctccagcccgggtcagcggccccggggcgacgtggagagcaggctggatgccctccagcgccagctcaacaggctggagacccggctgagtgcagacatggccactgtcctgcagctgctacagaggcagatgacgctggtcccgcccgcctacagtgctgtgaccaccccggggcctggccccacttccacatccccgctgttgcccgtcagccccctccccaccctcaccttggactcgctttctcaggtttcccagttcatggcgtgtgaggagctgcccccgggggccccagagcttccccaagaaggccccacacgacgcctctccctaccgggccagctgggggccctcacctcccagcccctgcacagacacggctcggacccgggcagttagtggggctgcccagtgtggacacgtggctcacccagggatcaaggcgctgctgggccgctccccttggaggccctgctcaggaggccctgaccgtggaaggggagaggaactcgaaagcacagctcctcccccagcccttgggaccatcttctcctgcagtcccctgggccccagtgagaggggcaggggcagggccggcagtaggtggggcctgtggtccccccactgccctgagggcattagctggtctaactgcccggaggcacccggccctgggccttaggcacctcaaggacttttctgctatttactgctcttattgttaaggataataattaaggatcatatgaataattaatgaagatgctgatgactatgaataataaataattatcctgaggaga

SEQ ID NO: 764 - DNA, 3884 bp, Homo sapiens
  source 1..3884: mol_type = genomic DNA
  misc_feature 1..3884: note = cDNA of KCNH2 gene SNP c.3095G>C (p.Arg1032Pro)
atgccggtgcggaggggccacgtcgcgccgcagaacaccttcctggacaccatcatccgcaagtttgagggccagagccgtaagttcatcatcgccaacgctcgggtggagaactgcgccgtcatctactgcaacgacggcttctgcgagctgtgcggctactcgcgggccgaggtgatgcagcgaccctgcacctgcgacttcctgcacgggccgcgcacgcagcgccgcgctgccgcgcagatcgcgcaggcactgctgggcgccgaggagcgcaaagtggaaatcgccttctaccggaaagatgggagctgcttcctatgtctggtggatgtggtgcccgtgaagaacgaggatggggctgtcatcatgttcatcctcaatttcgaggtggtgatggagaaggacatggtggggtccccggctcatgacaccaaccaccggggcccccccaccagctggctggccccaggccgcgccaagaccttccgcctgaagctgcccgcgctgctggcgctgacggcccgggagtcgtcggtgcggtcgggcggcgcgggcggcgcgggcgccccgggggccgtggtggtggacgtggacctgacgcccgcggcacccagcagcgagtcgctggccctggacgaagtgacagccatggacaaccacgtggcagggctcgggcccgcggaggagcggcgtgcgctggtgggtcccggctctccgccccgcagcgcgcccggccagctcccatcgccccgggcgcacagcctcaaccccgacgcctcgggctccagctgcagcctggcccggacgcgctcccgagaaagctgcgccagcgtgcgccgcgcctcgtcggccgacgacatcgaggccatgcgcgccggggtgctgcccccgccaccgcgccacgccagcaccggggccatgcacccactgcgcagcggcttgctcaactccacctcggactccgacctcgtgcgctaccgcaccattagcaagattccccaaatcaccctcaactttgtggacctcaagggcgaccccttcttggcttcgcccaccagtgaccgtgagatcatagcacctaagataaaggagcgaacccacaatgtcactgagaaggtcacccaggtcctgtccctgggcgccgacgtgctgcctgagtacaagctgcaggcaccgcgcatccaccgctggaccatcctgcattacagccccttcaaggccgtgtgggactggctcatcctgctgctggtcatctacacggctgtcttcacaccctactcggctgccttcctgctgaaggagacggaagaaggcccgcctgctaccgagtgtggctacgcctgccagccgctggctgtggtggacctcatcgtggacatcatgttcattgtggacatcctcatcaacttccgcaccacctacgtcaatgccaacgaggaggtggtcagccaccccggccgcatcgccgtccactacttcaagggctggttcctcatcgacatggtggccgccatccccttcgacctgctcatcttcggctctggctctgaggagctgatcgggctgctgaagactgcgcggctgctgcggctggtgcgcgtggcgcggaagctggatcgctactcagagtacggcgcggccgtgctgttcttgctcatgtgcacctttgcgctcatcgcgcactggctagcctgcatctggtacgccatcggcaacatggagcagccacacatggactcacgcatcggctggctgcacaacctgggcgaccagataggcaaaccctacaacagcagcggcctgggcggcccctccatcaaggacaagtatgtgacggcgctctacttcaccttcagcagcctcaccagtgtgggcttcggcaacgtctctcccaacaccaactcagagaagatcttctccatctgcgtcatgctcattggctccctcatgtatgctagcatcttcggcaacgtgtcggccatcatccagcggctgtactcgggcacagcccgctaccacacacagatgctgcgggtgcgggagttcatccgcttccaccagatccccaatcccctgcgccagcgcctcgaggagtacttccagcacgcctggtcctacaccaacggcatcgacatgaacgcggtgctgaagggcttccctgagtgcctgcaggctgacatctgcctgcacctgaaccgctcactgctgcagcactgcaaacccttccgaggggccaccaagggctgccttcgggccctggccatgaagttcaagaccacacatgcaccgccaggggacacactggtgcatgctggggacctgctcaccgccctgtacttcatctcccggggctccatcgagatcctgcggggcgacgtcgtcgtggccatcctggggaagaatgacatctttggggagcctctgaacctgtatgcaaggcctggcaagtcgaacggggatgtgcgggccctcacctactgtgacctacacaagatccatcgggacgacctgctggaggtgctggacatgtaccctgagttctccgaccacttctggtccagcctggagatcaccttcaacctgcgagataccaacatgatcccgggctcccccggcagtacggagttagagggtggcttcagtcggcaacgcaagcgcaagttgtccttccgcaggcgcacggacaaggacacggagcagccaggggaggtgtcggccttggggccgggccgggcgggggcagggccgagtagccggggccggccgggggggccgtggggggagagcccgtccagtggcccctccagccctgagagcagtgaggatgagggcccaggccgcagctccagccccctccgcctggtgcccttctccagccccaggccccccggagagccgccgggtggggagcccctgatggaggactgcgagaagagcagcgacacttgcaaccccctgtcaggcgccttctcaggagtgtccaacattttcagcttctggggggacagtcggggccgccagtaccaggagctccctcgatgccccgcccccacccccagcctcctcaacatccccctctccagcccgggtccgcggccccggggcgacgtggagagcaggctggatgccctccagcgccagctcaacaggctggagacccggctgagtgcagacatggccactgtcctgcagctgctacagaggcagatgacgctggtcccgcccgcctacagtgctgtgaccaccccggggcctggccccacttccacatccccgctgttgcccgtcagccccctccccaccctcaccttggactcgctttctcaggtttcccagttcatggcgtgtgaggagctgcccccgggggccccagagcttccccaagaaggccccacacgacgcctctccctaccgggccagctgggggccctcacctcccagcccctgcacagacacggctcggacccgggcagttagtggggctgcccagtgtggacacgtggctcacccagggatcaaggcgctgctgggccgctccccttggaggccctgctcaggaggccctgaccgtggaaggggagaggaactcgaaagcacagctcctcccccagcccttgggaccatcttctcctgcagtcccctgggccccagtgagaggggcaggggcagggccggcagtaggtggggcctgtggtccccccactgccctgagggcattagctggtctaactgcccggaggcacccggccctgggccttaggcacctcaaggacttttctgctatttactgctcttattgttaaggataataattaaggatcatatgaataattaatgaagatgctgatgactatgaataataaataattatcctgaggaga

SEQ ID NO: 765 - DNA, 3884 bp, Homo sapiens
  source 1..3884: mol_type = genomic DNA
  misc_feature 1..3884: note = cDNA of KCNH2 gene SNP c.3097C>T (p.Arg1033Trp)
atgccggtgcggaggggccacgtcgcgccgcagaacaccttcctggacaccatcatccgcaagtttgagggccagagccgtaagttcatcatcgccaacgctcgggtggagaactgcgccgtcatctactgcaacgacggcttctgcgagctgtgcggctactcgcgggccgaggtgatgcagcgaccctgcacctgcgacttcctgcacgggccgcgcacgcagcgccgcgctgccgcgcagatcgcgcaggcactgctgggcgccgaggagcgcaaagtggaaatcgccttctaccggaaagatgggagctgcttcctatgtctggtggatgtggtgcccgtgaagaacgaggatggggctgtcatcatgttcatcctcaatttcgaggtggtgatggagaaggacatggtggggtccccggctcatgacaccaaccaccggggcccccccaccagctggctggccccaggccgcgccaagaccttccgcctgaagctgcccgcgctgctggcgctgacggcccgggagtcgtcggtgcggtcgggcggcgcgggcggcgcgggcgccccgggggccgtggtggtggacgtggacctgacgcccgcggcacccagcagcgagtcgctggccctggacgaagtgacagccatggacaaccacgtggcagggctcgggcccgcggaggagcggcgtgcgctggtgggtcccggctctccgccccgcagcgcgcccggccagctcccatcgccccgggcgcacagcctcaaccccgacgcctcgggctccagctgcagcctggcccggacgcgctcccgagaaagctgcgccagcgtgcgccgcgcctcgtcggccgacgacatcgaggccatgcgcgccggggtgctgcccccgccaccgcgccacgccagcaccggggccatgcacccactgcgcagcggcttgctcaactccacctcggactccgacctcgtgcgctaccgcaccattagcaagattccccaaatcaccctcaactttgtggacctcaagggcgaccccttcttggcttcgcccaccagtgaccgtgagatcatagcacctaagataaaggagcgaacccacaatgtcactgagaaggtcacccaggtcctgtccctgggcgccgacgtgctgcctgagtacaagctgcaggcaccgcgcatccaccgctggaccatcctgcattacagccccttcaaggccgtgtgggactggctcatcctgctgctggtcatctacacggctgtcttcacaccctactcggctgccttcctgctgaaggagacggaagaaggcccgcctgctaccgagtgtggctacgcctgccagccgctggctgtggtggacctcatcgtggacatcatgttcattgtggacatcctcatcaacttccgcaccacctacgtcaatgccaacgaggaggtggtcagccaccccggccgcatcgccgtccactacttcaagggctggttcctcatcgacatggtggccgccatccccttcgacctgctcatcttcggctctggctctgaggagctgatcgggctgctgaagactgcgcggctgctgcggctggtgcgcgtggcgcggaagctggatcgctactcagagtacggcgcggccgtgctgttcttgctcatgtgcacctttgcgctcatcgcgcactggctagcctgcatctggtacgccatcggcaacatggagcagccacacatggactcacgcatcggctggctgcacaacctgggcgaccagataggcaaaccctacaacagcagcggcctgggcggcccctccatcaaggacaagtatgtgacggcgctctacttcaccttcagcagcctcaccagtgtgggcttcggcaacgtctctcccaacaccaactcagagaagatcttctccatctgcgtcatgctcattggctccctcatgtatgctagcatcttcggcaacgtgtcggccatcatccagcggctgtactcgggcacagcccgctaccacacacagatgctgcgggtgcgggagttcatccgcttccaccagatccccaatcccctgcgccagcgcctcgaggagtacttccagcacgcctggtcctacaccaacggcatcgacatgaacgcggtgctgaagggcttccctgagtgcctgcaggctgacatctgcctgcacctgaaccgctcactgctgcagcactgcaaacccttccgaggggccaccaagggctgccttcgggccctggccatgaagttcaagaccacacatgcaccgccaggggacacactggtgcatgctggggacctgctcaccgccctgtacttcatctcccggggctccatcgagatcctgcggggcgacgtcgtcgtggccatcctggggaagaatgacatctttggggagcctctgaacctgtatgcaaggcctggcaagtcgaacggggatgtgcgggccctcacctactgtgacctacacaagatccatcgggacgacctgctggaggtgctggacatgtaccctgagttctccgaccacttctggtccagcctggagatcaccttcaacctgcgagataccaacatgatcccgggctcccccggcagtacggagttagagggtggcttcagtcggcaacgcaagcgcaagttgtccttccgcaggcgcacggacaaggacacggagcagccaggggaggtgtcggccttggggccgggccgggcgggggcagggccgagtagccggggccggccgggggggccgtggggggagagcccgtccagtggcccctccagccctgagagcagtgaggatgagggcccaggccgcagctccagccccctccgcctggtgcccttctccagccccaggccccccggagagccgccgggtggggagcccctgatggaggactgcgagaagagcagcgacacttgcaaccccctgtcaggcgccttctcaggagtgtccaacattttcagcttctggggggacagtcggggccgccagtaccaggagctccctcgatgccccgcccccacccccagcctcctcaacatccccctctccagcccgggtcggtggccccggggcgacgtggagagcaggctggatgccctccagcgccagctcaacaggctggagacccggctgagtgcagacatggccactgtcctgcagctgctacagaggcagatgacgctggtcccgcccgcctacagtgctgtgaccaccccggggcctggccccacttccacatccccgctgttgcccgtcagccccctccccaccctcaccttggactcgctttctcaggtttcccagttcatggcgtgtgaggagctgcccccgggggccccagagcttccccaagaaggccccacacgacgcctctccctaccgggccagctgggggccctcacctcccagcccctgcacagacacggctcggacccgggcagttagtggggctgcccagtgtggacacgtggctcacccagggatcaaggcgctgctgggccgctccccttggaggccctgctcaggaggccctgaccgtggaaggggagaggaactcgaaagcacagctcctcccccagcccttgggaccatcttctcctgcagtcccctgggccccagtgagaggggcaggggcagggccggcagtaggtggggcctgtggtccccccactgccctgagggcattagctggtctaactgcccggaggcacccggccctgggccttaggcacctcaaggacttttctgctatttactgctcttattgttaaggataataattaaggatcatatgaataattaatgaagatgctgatgactatgaataataaataattatcctgaggaga

SEQ ID NO: 766 - DNA, 3884 bp, Homo sapiens
  source 1..3884: mol_type = genomic DNA
  misc_feature 1..3884: note = cDNA of KCNH2 gene SNP c.3098G>A (p.Arg1033Gln)
atgccggtgcggaggggccacgtcgcgccgcagaacaccttcctggacaccatcatccgcaagtttgagggccagagccgtaagttcatcatcgccaacgctcgggtggagaactgcgccgtcatctactgcaacgacggcttctgcgagctgtgcggctactcgcgggccgaggtgatgcagcgaccctgcacctgcgacttcctgcacgggccgcgcacgcagcgccgcgctgccgcgcagatcgcgcaggcactgctgggcgccgaggagcgcaaagtggaaatcgccttctaccggaaagatgggagctgcttcctatgtctggtggatgtggtgcccgtgaagaacgaggatggggctgtcatcatgttcatcctcaatttcgaggtggtgatggagaaggacatggtggggtccccggctcatgacaccaaccaccggggcccccccaccagctggctggccccaggccgcgccaagaccttccgcctgaagctgcccgcgctgctggcgctgacggcccgggagtcgtcggtgcggtcgggcggcgcgggcggcgcgggcgccccgggggccgtggtggtggacgtggacctgacgcccgcggcacccagcagcgagtcgctggccctggacgaagtgacagccatggacaaccacgtggcagggctcgggcccgcggaggagcggcgtgcgctggtgggtcccggctctccgccccgcagcgcgcccggccagctcccatcgccccgggcgcacagcctcaaccccgacgcctcgggctccagctgcagcctggcccggacgcgctcccgagaaagctgcgccagcgtgcgccgcgcctcgtcggccgacgacatcgaggccatgcgcgccggggtgctgcccccgccaccgcgccacgccagcaccggggccatgcacccactgcgcagcggcttgctcaactccacctcggactccgacctcgtgcgctaccgcaccattagcaagattccccaaatcaccctcaactttgtggacctcaagggcgaccccttcttggcttcgcccaccagtgaccgtgagatcatagcacctaagataaaggagcgaacccacaatgtcactgagaaggtcacccaggtcctgtccctgggcgccgacgtgctgcctgagtacaagctgcaggcaccgcgcatccaccgctggaccatcctgcattacagccccttcaaggccgtgtgggactggctcatcctgctgctggtcatctacacggctgtcttcacaccctactcggctgccttcctgctgaaggagacggaagaaggcccgcctgctaccgagtgtggctacgcctgccagccgctggctgtggtggacctcatcgtggacatcatgttcattgtggacatcctcatcaacttccgcaccacctacgtcaatgccaacgaggaggtggtcagccaccccggccgcatcgccgtccactacttcaagggctggttcctcatcgacatggtggccgccatccccttcgacctgctcatcttcggctctggctctgaggagctgatcgggctgctgaagactgcgcggctgctgcggctggtgcgcgtggcgcggaagctggatcgctactcagagtacggcgcggccgtgctgttcttgctcatgtgcacctttgcgctcatcgcgcactggctagcctgcatctggtacgccatcggcaacatggagcagccacacatggactcacgcatcggctggctgcacaacctgggcgaccagataggcaaaccctacaacagcagcggcctgggcggcccctccatcaaggacaagtatgtgacggcgctctacttcaccttcagcagcctcaccagtgtgggcttcggcaacgtctctcccaacaccaactcagagaagatcttctccatctgcgtcatgctcattggctccctcatgtatgctagcatcttcggcaacgtgtcggccatcatccagcggctgtactcgggcacagcccgctaccacacacagatgctgcgggtgcgggagttcatccgcttccaccagatccccaatcccctgcgccagcgcctcgaggagtacttccagcacgcctggtcctacaccaacggcatcgacatgaacgcggtgctgaagggcttccctgagtgcctgcaggctgacatctgcctgcacctgaaccgctcactgctgcagcactgcaaacccttccgaggggccaccaagggctgccttcgggccctggccatgaagttcaagaccacacatgcaccgccaggggacacactggtgcatgctggggacctgctcaccgccctgtacttcatctcccggggctccatcgagatcctgcggggcgacgtcgtcgtggccatcctggggaagaatgacatctttggggagcctctgaacctgtatgcaaggcctggcaagtcgaacggggatgtgcgggccctcacctactgtgacctacacaagatccatcgggacgacctgctggaggtgctggacatgtaccctgagttctccgaccacttctggtccagcctggagatcaccttcaacctgcgagataccaacatgatcccgggctcccccggcagtacggagttagagggtggcttcagtcggcaacgcaagcgcaagttgtccttccgcaggcgcacggacaaggacacggagcagccaggggaggtgtcggccttggggccgggccgggcgggggcagggccgagtagccggggccggccgggggggccgtggggggagagcccgtccagtggcccctccagccctgagagcagtgaggatgagggcccaggccgcagctccagccccctccgcctggtgcccttctccagccccaggccccccggagagccgccgggtggggagcccctgatggaggactgcgagaagagcagcgacacttgcaaccccctgtcaggcgccttctcaggagtgtccaacattttcagcttctggggggacagtcggggccgccagtaccaggagctccctcgatgccccgcccccacccccagcctcctcaacatccccctctccagcccgggtcggcagccccggggcgacgtggagagcaggctggatgccctccagcgccagctcaacaggctggagacccggctgagtgcagacatggccactgtcctgcagctgctacagaggcagatgacgctggtcccgcccgcctacagtgctgtgaccaccccggggcctggccccacttccacatccccgctgttgcccgtcagccccctccccaccctcaccttggactcgctttctcaggtttcccagttcatggcgtgtgaggagctgcccccgggggccccagagcttccccaagaaggccccacacgacgcctctccctaccgggccagctgggggccctcacctcccagcccctgcacagacacggctcggacccgggcagttagtggggctgcccagtgtggacacgtggctcacccagggatcaaggcgctgctgggccgctccccttggaggccctgctcaggaggccctgaccgtggaaggggagaggaactcgaaagcacagctcctcccccagcccttgggaccatcttctcctgcagtcccctgggccccagtgagaggggcaggggcagggccggcagtaggtggggcctgtggtccccccactgccctgagggcattagctggtctaactgcccggaggcacccggccctgggccttaggcacctcaaggacttttctgctatttactgctcttattgttaaggataataattaaggatcatatgaataattaatgaagatgctgatgactatgaataataaataattatcctgaggaga

SEQ ID NO: 767 - DNA, 3884 bp, Homo sapiens
  source 1..3884: mol_type = genomic DNA
  misc_feature 1..3884: note = cDNA of KCNH2 gene SNP c.3098G>T (p.Arg1033Leu)
atgccggtgcggaggggccacgtcgcgccgcagaacaccttcctggacaccatcatccgcaagtttgagggccagagccgtaagttcatcatcgccaacgctcgggtggagaactgcgccgtcatctactgcaacgacggcttctgcgagctgtgcggctactcgcgggccgaggtgatgcagcgaccctgcacctgcgacttcctgcacgggccgcgcacgcagcgccgcgctgccgcgcagatcgcgcaggcactgctgggcgccgaggagcgcaaagtggaaatcgccttctaccggaaagatgggagctgcttcctatgtctggtggatgtggtgcccgtgaagaacgaggatggggctgtcatcatgttcatcctcaatttcgaggtggtgatggagaaggacatggtggggtccccggctcatgacaccaaccaccggggcccccccaccagctggctggccccaggccgcgccaagaccttccgcctgaagctgcccgcgctgctggcgctgacggcccgggagtcgtcggtgcggtcgggcggcgcgggcggcgcgggcgccccgggggccgtggtggtggacgtggacctgacgcccgcggcacccagcagcgagtcgctggccctggacgaagtgacagccatggacaaccacgtggcagggctcgggcccgcggaggagcggcgtgcgctggtgggtcccggctctccgccccgcagcgcgcccggccagctcccatcgccccgggcgcacagcctcaaccccgacgcctcgggctccagctgcagcctggcccggacgcgctcccgagaaagctgcgccagcgtgcgccgcgcctcgtcggccgacgacatcgaggccatgcgcgccggggtgctgcccccgccaccgcgccacgccagcaccggggccatgcacccactgcgcagcggcttgctcaactccacctcggactccgacctcgtgcgctaccgcaccattagcaagattccccaaatcaccctcaactttgtggacctcaagggcgaccccttcttggcttcgcccaccagtgaccgtgagatcatagcacctaagataaaggagcgaacccacaatgtcactgagaaggtcacccaggtcctgtccctgggcgccgacgtgctgcctgagtacaagctgcaggcaccgcgcatccaccgctggaccatcctgcattacagccccttcaaggccgtgtgggactggctcatcctgctgctggtcatctacacggctgtcttcacaccctactcggctgccttcctgctgaaggagacggaagaaggcccgcctgctaccgagtgtggctacgcctgccagccgctggctgtggtggacctcatcgtggacatcatgttcattgtggacatcctcatcaacttccgcaccacctacgtcaatgccaacgaggaggtggtcagccaccccggccgcatcgccgtccactacttcaagggctggttcctcatcgacatggtggccgccatccccttcgacctgctcatcttcggctctggctctgaggagctgatcgggctgctgaagactgcgcggctgctgcggctggtgcgcgtggcgcggaagctggatcgctactcagagtacggcgcggccgtgctgttcttgctcatgtgcacctttgcgctcatcgcgcactggctagcctgcatctggtacgccatcggcaacatggagcagccacacatggactcacgcatcggctggctgcacaacctgggcgaccagataggcaaaccctacaacagcagcggcctgggcggcccctccatcaaggacaagtatgtgacggcgctctacttcaccttcagcagcctcaccagtgtgggcttcggcaacgtctctcccaacaccaactcagagaagatcttctccatctgcgtcatgctcattggctccctcatgtatgctagcatcttcggcaacgtgtcggccatcatccagcggctgtactcgggcacagcccgctaccacacacagatgctgcgggtgcgggagttcatccgcttccaccagatccccaatcccctgcgccagcgcctcgaggagtacttccagcacgcctggtcctacaccaacggcatcgacatgaacgcggtgctgaagggcttccctgagtgcctgcaggctgacatctgcctgcacctgaaccgctcactgctgcagcactgcaaacccttccgaggggccaccaagggctgccttcgggccctggccatgaagttcaagaccacacatgcaccgccaggggacacactggtgcatgctggggacctgctcaccgccctgtacttcatctcccggggctccatcgagatcctgcggggcgacgtcgtcgtggccatcctggggaagaatgacatctttggggagcctctgaacctgtatgcaaggcctggcaagtcgaacggggatgtgcgggccctcacctactgtgacctacacaagatccatcgggacgacctgctggaggtgctggacatgtaccctgagttctccgaccacttctggtccagcctggagatcaccttcaacctgcgagataccaacatgatcccgggctcccccggcagtacggagttagagggtggcttcagtcggcaacgcaagcgcaagttgtccttccgcaggcgcacggacaaggacacggagcagccaggggaggtgtcggccttggggccgggccgggcgggggcagggccgagtagccggggccggccgggggggccgtggggggagagcccgtccagtggcccctccagccctgagagcagtgaggatgagggcccaggccgcagctccagccccctccgcctggtgcccttctccagccccaggccccccggagagccgccgggtggggagcccctgatggaggactgcgagaagagcagcgacacttgcaaccccctgtcaggcgccttctcaggagtgtccaacattttcagcttctggggggacagtcggggccgccagtaccaggagctccctcgatgccccgcccccacccccagcctcctcaacatccccctctccagcccgggtcggctgccccggggcgacgtggagagcaggctggatgccctccagcgccagctcaacaggctggagacccggctgagtgcagacatggccactgtcctgcagctgctacagaggcagatgacgctggtcccgcccgcctacagtgctgtgaccaccccggggcctggccccacttccacatccccgctgttgcccgtcagccccctccccaccctcaccttggactcgctttctcaggtttcccagttcatggcgtgtgaggagctgcccccgggggccccagagcttccccaagaaggccccacacgacgcctctccctaccgggccagctgggggccctcacctcccagcccctgcacagacacggctcggacccgggcagttagtggggctgcccagtgtggacacgtggctcacccagggatcaaggcgctgctgggccgctccccttggaggccctgctcaggaggccctgaccgtggaaggggagaggaactcgaaagcacagctcctcccccagcccttgggaccatcttctcctgcagtcccctgggccccagtgagaggggcaggggcagggccggcagtaggtggggcctgtggtccccccactgccctgagggcattagctggtctaactgcccggaggcacccggccctgggccttaggcacctcaaggacttttctgctatttactgctcttattgttaaggataataattaaggatcatatgaataattaatgaagatgctgatgactatgaataataaataattatcctgaggaga

SEQ ID NO: 768 - DNA, 3884 bp, Homo sapiens
  source 1..3884: mol_type = genomic DNA
  misc_feature 1..3884: note = cDNA of KCNH2 gene SNP c.3103C>T (p.Arg1035Trp)
atgccggtgcggaggggccacgtcgcgccgcagaacaccttcctggacaccatcatccgcaagtttgagggccagagccgtaagttcatcatcgccaacgctcgggtggagaactgcgccgtcatctactgcaacgacggcttctgcgagctgtgcggctactcgcgggccgaggtgatgcagcgaccctgcacctgcgacttcctgcacgggccgcgcacgcagcgccgcgctgccgcgcagatcgcgcaggcactgctgggcgccgaggagcgcaaagtggaaatcgccttctaccggaaagatgggagctgcttcctatgtctggtggatgtggtgcccgtgaagaacgaggatggggctgtcatcatgttcatcctcaatttcgaggtggtgatggagaaggacatggtggggtccccggctcatgacaccaaccaccggggcccccccaccagctggctggccccaggccgcgccaagaccttccgcctgaagctgcccgcgctgctggcgctgacggcccgggagtcgtcggtgcggtcgggcggcgcgggcggcgcgggcgccccgggggccgtggtggtggacgtggacctgacgcccgcggcacccagcagcgagtcgctggccctggacgaagtgacagccatggacaaccacgtggcagggctcgggcccgcggaggagcggcgtgcgctggtgggtcccggctctccgccccgcagcgcgcccggccagctcccatcgccccgggcgcacagcctcaaccccgacgcctcgggctccagctgcagcctggcccggacgcgctcccgagaaagctgcgccagcgtgcgccgcgcctcgtcggccgacgacatcgaggccatgcgcgccggggtgctgcccccgccaccgcgccacgccagcaccggggccatgcacccactgcgcagcggcttgctcaactccacctcggactccgacctcgtgcgctaccgcaccattagcaagattccccaaatcaccctcaactttgtggacctcaagggcgaccccttcttggcttcgcccaccagtgaccgtgagatcatagcacctaagataaaggagcgaacccacaatgtcactgagaaggtcacccaggtcctgtccctgggcgccgacgtgctgcctgagtacaagctgcaggcaccgcgcatccaccgctggaccatcctgcattacagccccttcaaggccgtgtgggactggctcatcctgctgctggtcatctacacggctgtcttcacaccctactcggctgccttcctgctgaaggagacggaagaaggcccgcctgctaccgagtgtggctacgcctgccagccgctggctgtggtggacctcatcgtggacatcatgttcattgtggacatcctcatcaacttccgcaccacctacgtcaatgccaacgaggaggtggtcagccaccccggccgcatcgccgtccactacttcaagggctggttcctcatcgacatggtggccgccatccccttcgacctgctcatcttcggctctggctctgaggagctgatcgggctgctgaagactgcgcggctgctgcggctggtgcgcgtggcgcggaagctggatcgctactcagagtacggcgcggccgtgctgttcttgctcatgtgcacctttgcgctcatcgcgcactggctagcctgcatctggtacgccatcggcaacatggagcagccacacatggactcacgcatcggctggctgcacaacctgggcgaccagataggcaaaccctacaacagcagcggcctgggcggcccctccatcaaggacaagtatgtgacggcgctctacttcaccttcagcagcctcaccagtgtgggcttcggcaacgtctctcccaacaccaactcagagaagatcttctccatctgcgtcatgctcattggctccctcatgtatgctagcatcttcggcaacgtgtcggccatcatccagcggctgtactcgggcacagcccgctaccacacacagatgctgcgggtgcgggagttcatccgcttccaccagatccccaatcccctgcgccagcgcctcgaggagtacttccagcacgcctggtcctacaccaacggcatcgacatgaacgcggtgctgaagggcttccctgagtgcctgcaggctgacatctgcctgcacctgaaccgctcactgctgcagcactgcaaacccttccgaggggccaccaagggctgccttcgggccctggccatgaagttcaagaccacacatgcaccgccaggggacacactggtgcatgctggggacctgctcaccgccctgtacttcatctcccggggctccatcgagatcctgcggggcgacgtcgtcgtggccatcctggggaagaatgacatctttggggagcctctgaacctgtatgcaaggcctggcaagtcgaacggggatgtgcgggccctcacctactgtgacctacacaagatccatcgggacgacctgctggaggtgctggacatgtaccctgagttctccgaccacttctggtccagcctggagatcaccttcaacctgcgagataccaacatgatcccgggctcccccggcagtacggagttagagggtggcttcagtcggcaacgcaagcgcaagttgtccttccgcaggcgcacggacaaggacacggagcagccaggggaggtgtcggccttggggccgggccgggcgggggcagggccgagtagccggggccggccgggggggccgtggggggagagcccgtccagtggcccctccagccctgagagcagtgaggatgagggcccaggccgcagctccagccccctccgcctggtgcccttctccagccccaggccccccggagagccgccgggtggggagcccctgatggaggactgcgagaagagcagcgacacttgcaaccccctgtcaggcgccttctcaggagtgtccaacattttcagcttctggggggacagtcggggccgccagtaccaggagctccctcgatgccccgcccccacccccagcctcctcaacatccccctctccagcccgggtcggcggccctggggcgacgtggagagcaggctggatgccctccagcgccagctcaacaggctggagacccggctgagtgcagacatggccactgtcctgcagctgctacagaggcagatgacgctggtcccgcccgcctacagtgctgtgaccaccccggggcctggccccacttccacatccccgctgttgcccgtcagccccctccccaccctcaccttggactcgctttctcaggtttcccagttcatggcgtgtgaggagctgcccccgggggccccagagcttccccaagaaggccccacacgacgcctctccctaccgggccagctgggggccctcacctcccagcccctgcacagacacggctcggacccgggcagttagtggggctgcccagtgtggacacgtggctcacccagggatcaaggcgctgctgggccgctccccttggaggccctgctcaggaggccctgaccgtggaaggggagaggaactcgaaagcacagctcctcccccagcccttgggaccatcttctcctgcagtcccctgggccccagtgagaggggcaggggcagggccggcagtaggtggggcctgtggtccccccactgccctgagggcattagctggtctaactgcccggaggcacccggccctgggccttaggcacctcaaggacttttctgctatttactgctcttattgttaaggataataattaaggatcatatgaataattaatgaagatgctgatgactatgaataataaataattatcctgaggaga

SEQ ID NO: 769 - DNA, 3884 bp, Homo sapiens
  source 1..3884: mol_type = genomic DNA
  misc_feature 1..3884: note = cDNA of KCNH2 gene SNP c.3104G>A (p.Arg1035Gln)
atgccggtgcggaggggccacgtcgcgccgcagaacaccttcctggacaccatcatccgcaagtttgagggccagagccgtaagttcatcatcgccaacgctcgggtggagaactgcgccgtcatctactgcaacgacggcttctgcgagctgtgcggctactcgcgggccgaggtgatgcagcgaccctgcacctgcgacttcctgcacgggccgcgcacgcagcgccgcgctgccgcgcagatcgcgcaggcactgctgggcgccgaggagcgcaaagtggaaatcgccttctaccggaaagatgggagctgcttcctatgtctggtggatgtggtgcccgtgaagaacgaggatggggctgtcatcatgttcatcctcaatttcgaggtggtgatggagaaggacatggtggggtccccggctcatgacaccaaccaccggggcccccccaccagctggctggccccaggccgcgccaagaccttccgcctgaagctgcccgcgctgctggcgctgacggcccgggagtcgtcggtgcggtcgggcggcgcgggcggcgcgggcgccccgggggccgtggtggtggacgtggacctgacgcccgcggcacccagcagcgagtcgctggccctggacgaagtgacagccatggacaaccacgtggcagggctcgggcccgcggaggagcggcgtgcgctggtgggtcccggctctccgccccgcagcgcgcccggccagctcccatcgccccgggcgcacagcctcaaccccgacgcctcgggctccagctgcagcctggcccggacgcgctcccgagaaagctgcgccagcgtgcgccgcgcctcgtcggccgacgacatcgaggccatgcgcgccggggtgctgcccccgccaccgcgccacgccagcaccggggccatgcacccactgcgcagcggcttgctcaactccacctcggactccgacctcgtgcgctaccgcaccattagcaagattccccaaatcaccctcaactttgtggacctcaagggcgaccccttcttggcttcgcccaccagtgaccgtgagatcatagcacctaagataaaggagcgaacccacaatgtcactgagaaggtcacccaggtcctgtccctgggcgccgacgtgctgcctgagtacaagctgcaggcaccgcgcatccaccgctggaccatcctgcattacagccccttcaaggccgtgtgggactggctcatcctgctgctggtcatctacacggctgtcttcacaccctactcggctgccttcctgctgaaggagacggaagaaggcccgcctgctaccgagtgtggctacgcctgccagccgctggctgtggtggacctcatcgtggacatcatgttcattgtggacatcctcatcaacttccgcaccacctacgtcaatgccaacgaggaggtggtcagccaccccggccgcatcgccgtccactacttcaagggctggttcctcatcgacatggtggccgccatccccttcgacctgctcatcttcggctctggctctgaggagctgatcgggctgctgaagactgcgcggctgctgcggctggtgcgcgtggcgcggaagctggatcgctactcagagtacggcgcggccgtgctgttcttgctcatgtgcacctttgcgctcatcgcgcactggctagcctgcatctggtacgccatcggcaacatggagcagccacacatggactcacgcatcggctggctgcacaacctgggcgaccagataggcaaaccctacaacagcagcggcctgggcggcccctccatcaaggacaagtatgtgacggcgctctacttcaccttcagcagcctcaccagtgtgggcttcggcaacgtctctcccaacaccaactcagagaagatcttctccatctgcgtcatgctcattggctccctcatgtatgctagcatcttcggcaacgtgtcggccatcatccagcggctgtactcgggcacagcccgctaccacacacagatgctgcgggtgcgggagttcatccgcttccaccagatccccaatcccctgcgccagcgcctcgaggagtacttccagcacgcctggtcctacaccaacggcatcgacatgaacgcggtgctgaagggcttccctgagtgcctgcaggctgacatctgcctgcacctgaaccgctcactgctgcagcactgcaaacccttccgaggggccaccaagggctgccttcgggccctggccatgaagttcaagaccacacatgcaccgccaggggacacactggtgcatgctggggacctgctcaccgccctgtacttcatctcccggggctccatcgagatcctgcggggcgacgtcgtcgtggccatcctggggaagaatgacatctttggggagcctctgaacctgtatgcaaggcctggcaagtcgaacggggatgtgcgggccctcacctactgtgacctacacaagatccatcgggacgacctgctggaggtgctggacatgtaccctgagttctccgaccacttctggtccagcctggagatcaccttcaacctgcgagataccaacatgatcccgggctcccccggcagtacggagttagagggtggcttcagtcggcaacgcaagcgcaagttgtccttccgcaggcgcacggacaaggacacggagcagccaggggaggtgtcggccttggggccgggccgggcgggggcagggccgagtagccggggccggccgggggggccgtggggggagagcccgtccagtggcccctccagccctgagagcagtgaggatgagggcccaggccgcagctccagccccctccgcctggtgcccttctccagccccaggccccccggagagccgccgggtggggagcccctgatggaggactgcgagaagagcagcgacacttgcaaccccctgtcaggcgccttctcaggagtgtccaacattttcagcttctggggggacagtcggggccgccagtaccaggagctccctcgatgccccgcccccacccccagcctcctcaacatccccctctccagcccgggtcggcggccccagggcgacgtggagagcaggctggatgccctccagcgccagctcaacaggctggagacccggctgagtgcagacatggccactgtcctgcagctgctacagaggcagatgacgctggtcccgcccgcctacagtgctgtgaccaccccggggcctggccccacttccacatccccgctgttgcccgtcagccccctccccaccctcaccttggactcgctttctcaggtttcccagttcatggcgtgtgaggagctgcccccgggggccccagagcttccccaagaaggccccacacgacgcctctccctaccgggccagctgggggccctcacctcccagcccctgcacagacacggctcggacccgggcagttagtggggctgcccagtgtggacacgtggctcacccagggatcaaggcgctgctgggccgctccccttggaggccctgctcaggaggccctgaccgtggaaggggagaggaactcgaaagcacagctcctcccccagcccttgggaccatcttctcctgcagtcccctgggccccagtgagaggggcaggggcagggccggcagtaggtggggcctgtggtccccccactgccctgagggcattagctggtctaactgcccggaggcacccggccctgggccttaggcacctcaaggacttttctgctatttactgctcttattgttaaggataataattaaggatcatatgaataattaatgaagatgctgatgactatgaataataaataattatcctgaggaga

SEQ ID NO: 770 - DNA, 3884 bp, Homo sapiens
  source 1..3884: mol_type = genomic DNA
  misc_feature 1..3884: note = cDNA of KCNH2 gene SNP c.3107G>A (p.Gly1036Asp)
atgccggtgcggaggggccacgtcgcgccgcagaacaccttcctggacaccatcatccgcaagtttgagggccagagccgtaagttcatcatcgccaacgctcgggtggagaactgcgccgtcatctactgcaacgacggcttctgcgagctgtgcggctactcgcgggccgaggtgatgcagcgaccctgcacctgcgacttcctgcacgggccgcgcacgcagcgccgcgctgccgcgcagatcgcgcaggcactgctgggcgccgaggagcgcaaagtggaaatcgccttctaccggaaagatgggagctgcttcctatgtctggtggatgtggtgcccgtgaagaacgaggatggggctgtcatcatgttcatcctcaatttcgaggtggtgatggagaaggacatggtggggtccccggctcatgacaccaaccaccggggcccccccaccagctggctggccccaggccgcgccaagaccttccgcctgaagctgcccgcgctgctggcgctgacggcccgggagtcgtcggtgcggtcgggcggcgcgggcggcgcgggcgccccgggggccgtggtggtggacgtggacctgacgcccgcggcacccagcagcgagtcgctggccctggacgaagtgacagccatggacaaccacgtggcagggctcgggcccgcggaggagcggcgtgcgctggtgggtcccggctctccgccccgcagcgcgcccggccagctcccatcgccccgggcgcacagcctcaaccccgacgcctcgggctccagctgcagcctggcccggacgcgctcccgagaaagctgcgccagcgtgcgccgcgcctcgtcggccgacgacatcgaggccatgcgcgccggggtgctgcccccgccaccgcgccacgccagcaccggggccatgcacccactgcgcagcggcttgctcaactccacctcggactccgacctcgtgcgctaccgcaccattagcaagattccccaaatcaccctcaactttgtggacctcaagggcgaccccttcttggcttcgcccaccagtgaccgtgagatcatagcacctaagataaaggagcgaacccacaatgtcactgagaaggtcacccaggtcctgtccctgggcgccgacgtgctgcctgagtacaagctgcaggcaccgcgcatccaccgctggaccatcctgcattacagccccttcaaggccgtgtgggactggctcatcctgctgctggtcatctacacggctgtcttcacaccctactcggctgccttcctgctgaaggagacggaagaaggcccgcctgctaccgagtgtggctacgcctgccagccgctggctgtggtggacctcatcgtggacatcatgttcattgtggacatcctcatcaacttccgcaccacctacgtcaatgccaacgaggaggtggtcagccaccccggccgcatcgccgtccactacttcaagggctggttcctcatcgacatggtggccgccatccccttcgacctgctcatcttcggctctggctctgaggagctgatcgggctgctgaagactgcgcggctgctgcggctggtgcgcgtggcgcggaagctggatcgctactcagagtacggcgcggccgtgctgttcttgctcatgtgcacctttgcgctcatcgcgcactggctagcctgcatctggtacgccatcggcaacatggagcagccacacatggactcacgcatcggctggctgcacaacctgggcgaccagataggcaaaccctacaacagcagcggcctgggcggcccctccatcaaggacaagtatgtgacggcgctctacttcaccttcagcagcctcaccagtgtgggcttcggcaacgtctctcccaacaccaactcagagaagatcttctccatctgcgtcatgctcattggctccctcatgtatgctagcatcttcggcaacgtgtcggccatcatccagcggctgtactcgggcacagcccgctaccacacacagatgctgcgggtgcgggagttcatccgcttccaccagatccccaatcccctgcgccagcgcctcgaggagtacttccagcacgcctggtcctacaccaacggcatcgacatgaacgcggtgctgaagggcttccctgagtgcctgcaggctgacatctgcctgcacctgaaccgctcactgctgcagcactgcaaacccttccgaggggccaccaagggctgccttcgggccctggccatgaagttcaagaccacacatgcaccgccaggggacacactggtgcatgctggggacctgctcaccgccctgtacttcatctcccggggctccatcgagatcctgcggggcgacgtcgtcgtggccatcctggggaagaatgacatctttggggagcctctgaacctgtatgcaaggcctggcaagtcgaacggggatgtgcgggccctcacctactgtgacctacacaagatccatcgggacgacctgctggaggtgctggacatgtaccctgagttctccgaccacttctggtccagcctggagatcaccttcaacctgcgagataccaacatgatcccgggctcccccggcagtacggagttagagggtggcttcagtcggcaacgcaagcgcaagttgtccttccgcaggcgcacggacaaggacacggagcagccaggggaggtgtcggccttggggccgggccgggcgggggcagggccgagtagccggggccggccgggggggccgtggggggagagcccgtccagtggcccctccagccctgagagcagtgaggatgagggcccaggccgcagctccagccccctccgcctggtgcccttctccagccccaggccccccggagagccgccgggtggggagcccctgatggaggactgcgagaagagcagcgacacttgcaaccccctgtcaggcgccttctcaggagtgtccaacattttcagcttctggggggacagtcggggccgccagtaccaggagctccctcgatgccccgcccccacccccagcctcctcaacatccccctctccagcccgggtcggcggccccgggacgacgtggagagcaggctggatgccctccagcgccagctcaacaggctggagacccggctgagtgcagacatggccactgtcctgcagctgctacagaggcagatgacgctggtcccgcccgcctacagtgctgtgaccaccccggggcctggccccacttccacatccccgctgttgcccgtcagccccctccccaccctcaccttggactcgctttctcaggtttcccagttcatggcgtgtgaggagctgcccccgggggccccagagcttccccaagaaggccccacacgacgcctctccctaccgggccagctgggggccctcacctcccagcccctgcacagacacggctcggacccgggcagttagtggggctgcccagtgtggacacgtggctcacccagggatcaaggcgctgctgggccgctccccttggaggccctgctcaggaggccctgaccgtggaaggggagaggaactcgaaagcacagctcctcccccagcccttgggaccatcttctcctgcagtcccctgggccccagtgagaggggcaggggcagggccggcagtaggtggggcctgtggtccccccactgccctgagggcattagctggtctaactgcccggaggcacccggccctgggccttaggcacctcaaggacttttctgctatttactgctcttattgttaaggataataattaaggatcatatgaataattaatgaagatgctgatgactatgaataataaataattatcctgaggaga

SEQ ID NO: 771 - DNA, 3884 bp, Homo sapiens
  source 1..3884: mol_type = genomic DNA
  misc_feature 1..3884: note = cDNA of KCNH2 gene SNP c.3109G>A (p.Asp1037Asn)
atgccggtgcggaggggccacgtcgcgccgcagaacaccttcctggacaccatcatccgcaagtttgagggccagagccgtaagttcatcatcgccaacgctcgggtggagaactgcgccgtcatctactgcaacgacggcttctgcgagctgtgcggctactcgcgggccgaggtgatgcagcgaccctgcacctgcgacttcctgcacgggccgcgcacgcagcgccgcgctgccgcgcagatcgcgcaggcactgctgggcgccgaggagcgcaaagtggaaatcgccttctaccggaaagatgggagctgcttcctatgtctggtggatgtggtgcccgtgaagaacgaggatggggctgtcatcatgttcatcctcaatttcgaggtggtgatggagaaggacatggtggggtccccggctcatgacaccaaccaccggggcccccccaccagctggctggccccaggccgcgccaagaccttccgcctgaagctgcccgcgctgctggcgctgacggcccgggagtcgtcggtgcggtcgggcggcgcgggcggcgcgggcgccccgggggccgtggtggtggacgtggacctgacgcccgcggcacccagcagcgagtcgctggccctggacgaagtgacagccatggacaaccacgtggcagggctcgggcccgcggaggagcggcgtgcgctggtgggtcccggctctccgccccgcagcgcgcccggccagctcccatcgccccgggcgcacagcctcaaccccgacgcctcgggctccagctgcagcctggcccggacgcgctcccgagaaagctgcgccagcgtgcgccgcgcctcgtcggccgacgacatcgaggccatgcgcgccggggtgctgcccccgccaccgcgccacgccagcaccggggccatgcacccactgcgcagcggcttgctcaactccacctcggactccgacctcgtgcgctaccgcaccattagcaagattccccaaatcaccctcaactttgtggacctcaagggcgaccccttcttggcttcgcccaccagtgaccgtgagatcatagcacctaagataaaggagcgaacccacaatgtcactgagaaggtcacccaggtcctgtccctgggcgccgacgtgctgcctgagtacaagctgcaggcaccgcgcatccaccgctggaccatcctgcattacagccccttcaaggccgtgtgggactggctcatcctgctgctggtcatctacacggctgtcttcacaccctactcggctgccttcctgctgaaggagacggaagaaggcccgcctgctaccgagtgtggctacgcctgccagccgctggctgtggtggacctcatcgtggacatcatgttcattgtggacatcctcatcaacttccgcaccacctacgtcaatgccaacgaggaggtggtcagccaccccggccgcatcgccgtccactacttcaagggctggttcctcatcgacatggtggccgccatccccttcgacctgctcatcttcggctctggctctgaggagctgatcgggctgctgaagactgcgcggctgctgcggctggtgcgcgtggcgcggaagctggatcgctactcagagtacggcgcggccgtgctgttcttgctcatgtgcacctttgcgctcatcgcgcactggctagcctgcatctggtacgccatcggcaacatggagcagccacacatggactcacgcatcggctggctgcacaacctgggcgaccagataggcaaaccctacaacagcagcggcctgggcggcccctccatcaaggacaagtatgtgacggcgctctacttcaccttcagcagcctcaccagtgtgggcttcggcaacgtctctcccaacaccaactcagagaagatcttctccatctgcgtcatgctcattggctccctcatgtatgctagcatcttcggcaacgtgtcggccatcatccagcggctgtactcgggcacagcccgctaccacacacagatgctgcgggtgcgggagttcatccgcttccaccagatccccaatcccctgcgccagcgcctcgaggagtacttccagcacgcctggtcctacaccaacggcatcgacatgaacgcggtgctgaagggcttccctgagtgcctgcaggctgacatctgcctgcacctgaaccgctcactgctgcagcactgcaaacccttccgaggggccaccaagggctgccttcgggccctggccatgaagttcaagaccacacatgcaccgccaggggacacactggtgcatgctggggacctgctcaccgccctgtacttcatctcccggggctccatcgagatcctgcggggcgacgtcgtcgtggccatcctggggaagaatgacatctttggggagcctctgaacctgtatgcaaggcctggcaagtcgaacggggatgtgcgggccctcacctactgtgacctacacaagatccatcgggacgacctgctggaggtgctggacatgtaccctgagttctccgaccacttctggtccagcctggagatcaccttcaacctgcgagataccaacatgatcccgggctcccccggcagtacggagttagagggtggcttcagtcggcaacgcaagcgcaagttgtccttccgcaggcgcacggacaaggacacggagcagccaggggaggtgtcggccttggggccgggccgggcgggggcagggccgagtagccggggccggccgggggggccgtggggggagagcccgtccagtggcccctccagccctgagagcagtgaggatgagggcccaggccgcagctccagccccctccgcctggtgcccttctccagccccaggccccccggagagccgccgggtggggagcccctgatggaggactgcgagaagagcagcgacacttgcaaccccctgtcaggcgccttctcaggagtgtccaacattttcagcttctggggggacagtcggggccgccagtaccaggagctccctcgatgccccgcccccacccccagcctcctcaacatccccctctccagcccgggtcggcggccccggggcaacgtggagagcaggctggatgccctccagcgccagctcaacaggctggagacccggctgagtgcagacatggccactgtcctgcagctgctacagaggcagatgacgctggtcccgcccgcctacagtgctgtgaccaccccggggcctggccccacttccacatccccgctgttgcccgtcagccccctccccaccctcaccttggactcgctttctcaggtttcccagttcatggcgtgtgaggagctgcccccgggggccccagagcttccccaagaaggccccacacgacgcctctccctaccgggccagctgggggccctcacctcccagcccctgcacagacacggctcggacccgggcagttagtggggctgcccagtgtggacacgtggctcacccagggatcaaggcgctgctgggccgctccccttggaggccctgctcaggaggccctgaccgtggaaggggagaggaactcgaaagcacagctcctcccccagcccttgggaccatcttctcctgcagtcccctgggccccagtgagaggggcaggggcagggccggcagtaggtggggcctgtggtccccccactgccctgagggcattagctggtctaactgcccggaggcacccggccctgggccttaggcacctcaaggacttttctgctatttactgctcttattgttaaggataataattaaggatcatatgaataattaatgaagatgctgatgactatgaataataaataattatcctgaggaga

SEQ ID NO: 772 - DNA, 3884 bp, Homo sapiens
  source 1..3884: mol_type = genomic DNA
  misc_feature 1..3884: note = cDNA of KCNH2 gene SNP c.3112G>A (p.Val1038Met)
atgccggtgcggaggggccacgtcgcgccgcagaacaccttcctggacaccatcatccgcaagtttgagggccagagccgtaagttcatcatcgccaacgctcgggtggagaactgcgccgtcatctactgcaacgacggcttctgcgagctgtgcggctactcgcgggccgaggtgatgcagcgaccctgcacctgcgacttcctgcacgggccgcgcacgcagcgccgcgctgccgcgcagatcgcgcaggcactgctgggcgccgaggagcgcaaagtggaaatcgccttctaccggaaagatgggagctgcttcctatgtctggtggatgtggtgcccgtgaagaacgaggatggggctgtcatcatgttcatcctcaatttcgaggtggtgatggagaaggacatggtggggtccccggctcatgacaccaaccaccggggcccccccaccagctggctggccccaggccgcgccaagaccttccgcctgaagctgcccgcgctgctggcgctgacggcccgggagtcgtcggtgcggtcgggcggcgcgggcggcgcgggcgccccgggggccgtggtggtggacgtggacctgacgcccgcggcacccagcagcgagtcgctggccctggacgaagtgacagccatggacaaccacgtggcagggctcgggcccgcggaggagcggcgtgcgctggtgggtcccggctctccgccccgcagcgcgcccggccagctcccatcgccccgggcgcacagcctcaaccccgacgcctcgggctccagctgcagcctggcccggacgcgctcccgagaaagctgcgccagcgtgcgccgcgcctcgtcggccgacgacatcgaggccatgcgcgccggggtgctgcccccgccaccgcgccacgccagcaccggggccatgcacccactgcgcagcggcttgctcaactccacctcggactccgacctcgtgcgctaccgcaccattagcaagattccccaaatcaccctcaactttgtggacctcaagggcgaccccttcttggcttcgcccaccagtgaccgtgagatcatagcacctaagataaaggagcgaacccacaatgtcactgagaaggtcacccaggtcctgtccctgggcgccgacgtgctgcctgagtacaagctgcaggcaccgcgcatccaccgctggaccatcctgcattacagccccttcaaggccgtgtgggactggctcatcctgctgctggtcatctacacggctgtcttcacaccctactcggctgccttcctgctgaaggagacggaagaaggcccgcctgctaccgagtgtggctacgcctgccagccgctggctgtggtggacctcatcgtggacatcatgttcattgtggacatcctcatcaacttccgcaccacctacgtcaatgccaacgaggaggtggtcagccaccccggccgcatcgccgtccactacttcaagggctggttcctcatcgacatggtggccgccatccccttcgacctgctcatcttcggctctggctctgaggagctgatcgggctgctgaagactgcgcggctgctgcggctggtgcgcgtggcgcggaagctggatcgctactcagagtacggcgcggccgtgctgttcttgctcatgtgcacctttgcgctcatcgcgcactggctagcctgcatctggtacgccatcggcaacatggagcagccacacatggactcacgcatcggctggctgcacaacctgggcgaccagataggcaaaccctacaacagcagcggcctgggcggcccctccatcaaggacaagtatgtgacggcgctctacttcaccttcagcagcctcaccagtgtgggcttcggcaacgtctctcccaacaccaactcagagaagatcttctccatctgcgtcatgctcattggctccctcatgtatgctagcatcttcggcaacgtgtcggccatcatccagcggctgtactcgggcacagcccgctaccacacacagatgctgcgggtgcgggagttcatccgcttccaccagatccccaatcccctgcgccagcgcctcgaggagtacttccagcacgcctggtcctacaccaacggcatcgacatgaacgcggtgctgaagggcttccctgagtgcctgcaggctgacatctgcctgcacctgaaccgctcactgctgcagcactgcaaacccttccgaggggccaccaagggctgccttcgggccctggccatgaagttcaagaccacacatgcaccgccaggggacacactggtgcatgctggggacctgctcaccgccctgtacttcatctcccggggctccatcgagatcctgcggggcgacgtcgtcgtggccatcctggggaagaatgacatctttggggagcctctgaacctgtatgcaaggcctggcaagtcgaacggggatgtgcgggccctcacctactgtgacctacacaagatccatcgggacgacctgctggaggtgctggacatgtaccctgagttctccgaccacttctggtccagcctggagatcaccttcaacctgcgagataccaacatgatcccgggctcccccggcagtacggagttagagggtggcttcagtcggcaacgcaagcgcaagttgtccttccgcaggcgcacggacaaggacacggagcagccaggggaggtgtcggccttggggccgggccgggcgggggcagggccgagtagccggggccggccgggggggccgtggggggagagcccgtccagtggcccctccagccctgagagcagtgaggatgagggcccaggccgcagctccagccccctccgcctggtgcccttctccagccccaggccccccggagagccgccgggtggggagcccctgatggaggactgcgagaagagcagcgacacttgcaaccccctgtcaggcgccttctcaggagtgtccaacattttcagcttctggggggacagtcggggccgccagtaccaggagctccctcgatgccccgcccccacccccagcctcctcaacatccccctctccagcccgggtcggcggccccggggcgacatggagagcaggctggatgccctccagcgccagctcaacaggctggagacccggctgagtgcagacatggccactgtcctgcagctgctacagaggcagatgacgctggtcccgcccgcctacagtgctgtgaccaccccggggcctggccccacttccacatccccgctgttgcccgtcagccccctccccaccctcaccttggactcgctttctcaggtttcccagttcatggcgtgtgaggagctgcccccgggggccccagagcttccccaagaaggccccacacgacgcctctccctaccgggccagctgggggccctcacctcccagcccctgcacagacacggctcggacccgggcagttagtggggctgcccagtgtggacacgtggctcacccagggatcaaggcgctgctgggccgctccccttggaggccctgctcaggaggccctgaccgtggaaggggagaggaactcgaaagcacagctcctcccccagcccttgggaccatcttctcctgcagtcccctgggccccagtgagaggggcaggggcagggccggcagtaggtggggcctgtggtccccccactgccctgagggcattagctggtctaactgcccggaggcacccggccctgggccttaggcacctcaaggacttttctgctatttactgctcttattgttaaggataataattaaggatcatatgaataattaatgaagatgctgatgactatgaataataaataattatcctgaggaga

SEQ ID NO: 773 - DNA, 3884 bp, Homo sapiens
  source 1..3884: mol_type = genomic DNA
  misc_feature 1..3884: note = cDNA of KCNH2 gene SNP c.3112G>T (p.Val1038Leu)
atgccggtgcggaggggccacgtcgcgccgcagaacaccttcctggacaccatcatccgcaagtttgagggccagagccgtaagttcatcatcgccaacgctcgggtggagaactgcgccgtcatctactgcaacgacggcttctgcgagctgtgcggctactcgcgggccgaggtgatgcagcgaccctgcacctgcgacttcctgcacgggccgcgcacgcagcgccgcgctgccgcgcagatcgcgcaggcactgctgggcgccgaggagcgcaaagtggaaatcgccttctaccggaaagatgggagctgcttcctatgtctggtggatgtggtgcccgtgaagaacgaggatggggctgtcatcatgttcatcctcaatttcgaggtggtgatggagaaggacatggtggggtccccggctcatgacaccaaccaccggggcccccccaccagctggctggccccaggccgcgccaagaccttccgcctgaagctgcccgcgctgctggcgctgacggcccgggagtcgtcggtgcggtcgggcggcgcgggcggcgcgggcgccccgggggccgtggtggtggacgtggacctgacgcccgcggcacccagcagcgagtcgctggccctggacgaagtgacagccatggacaaccacgtggcagggctcgggcccgcggaggagcggcgtgcgctggtgggtcccggctctccgccccgcagcgcgcccggccagctcccatcgccccgggcgcacagcctcaaccccgacgcctcgggctccagctgcagcctggcccggacgcgctcccgagaaagctgcgccagcgtgcgccgcgcctcgtcggccgacgacatcgaggccatgcgcgccggggtgctgcccccgccaccgcgccacgccagcaccggggccatgcacccactgcgcagcggcttgctcaactccacctcggactccgacctcgtgcgctaccgcaccattagcaagattccccaaatcaccctcaactttgtggacctcaagggcgaccccttcttggcttcgcccaccagtgaccgtgagatcatagcacctaagataaaggagcgaacccacaatgtcactgagaaggtcacccaggtcctgtccctgggcgccgacgtgctgcctgagtacaagctgcaggcaccgcgcatccaccgctggaccatcctgcattacagccccttcaaggccgtgtgggactggctcatcctgctgctggtcatctacacggctgtcttcacaccctactcggctgccttcctgctgaaggagacggaagaaggcccgcctgctaccgagtgtggctacgcctgccagccgctggctgtggtggacctcatcgtggacatcatgttcattgtggacatcctcatcaacttccgcaccacctacgtcaatgccaacgaggaggtggtcagccaccccggccgcatcgccgtccactacttcaagggctggttcctcatcgacatggtggccgccatccccttcgacctgctcatcttcggctctggctctgaggagctgatcgggctgctgaagactgcgcggctgctgcggctggtgcgcgtggcgcggaagctggatcgctactcagagtacggcgcggccgtgctgttcttgctcatgtgcacctttgcgctcatcgcgcactggctagcctgcatctggtacgccatcggcaacatggagcagccacacatggactcacgcatcggctggctgcacaacctgggcgaccagataggcaaaccctacaacagcagcggcctgggcggcccctccatcaaggacaagtatgtgacggcgctctacttcaccttcagcagcctcaccagtgtgggcttcggcaacgtctctcccaacaccaactcagagaagatcttctccatctgcgtcatgctcattggctccctcatgtatgctagcatcttcggcaacgtgtcggccatcatccagcggctgtactcgggcacagcccgctaccacacacagatgctgcgggtgcgggagttcatccgcttccaccagatccccaatcccctgcgccagcgcctcgaggagtacttccagcacgcctggtcctacaccaacggcatcgacatgaacgcggtgctgaagggcttccctgagtgcctgcaggctgacatctgcctgcacctgaaccgctcactgctgcagcactgcaaacccttccgaggggccaccaagggctgccttcgggccctggccatgaagttcaagaccacacatgcaccgccaggggacacactggtgcatgctggggacctgctcaccgccctgtacttcatctcccggggctccatcgagatcctgcggggcgacgtcgtcgtggccatcctggggaagaatgacatctttggggagcctctgaacctgtatgcaaggcctggcaagtcgaacggggatgtgcgggccctcacctactgtgacctacacaagatccatcgggacgacctgctggaggtgctggacatgtaccctgagttctccgaccacttctggtccagcctggagatcaccttcaacctgcgagataccaacatgatcccgggctcccccggcagtacggagttagagggtggcttcagtcggcaacgcaagcgcaagttgtccttccgcaggcgcacggacaaggacacggagcagccaggggaggtgtcggccttggggccgggccgggcgggggcagggccgagtagccggggccggccgggggggccgtggggggagagcccgtccagtggcccctccagccctgagagcagtgaggatgagggcccaggccgcagctccagccccctccgcctggtgcccttctccagccccaggccccccggagagccgccgggtggggagcccctgatggaggactgcgagaagagcagcgacacttgcaaccccctgtcaggcgccttctcaggagtgtccaacattttcagcttctggggggacagtcggggccgccagtaccaggagctccctcgatgccccgcccccacccccagcctcctcaacatccccctctccagcccgggtcggcggccccggggcgacttggagagcaggctggatgccctccagcgccagctcaacaggctggagacccggctgagtgcagacatggccactgtcctgcagctgctacagaggcagatgacgctggtcccgcccgcctacagtgctgtgaccaccccggggcctggccccacttccacatccccgctgttgcccgtcagccccctccccaccctcaccttggactcgctttctcaggtttcccagttcatggcgtgtgaggagctgcccccgggggccccagagcttccccaagaaggccccacacgacgcctctccctaccgggccagctgggggccctcacctcccagcccctgcacagacacggctcggacccgggcagttagtggggctgcccagtgtggacacgtggctcacccagggatcaaggcgctgctgggccgctccccttggaggccctgctcaggaggccctgaccgtggaaggggagaggaactcgaaagcacagctcctcccccagcccttgggaccatcttctcctgcagtcccctgggccccagtgagaggggcaggggcagggccggcagtaggtggggcctgtggtccccccactgccctgagggcattagctggtctaactgcccggaggcacccggccctgggccttaggcacctcaaggacttttctgctatttactgctcttattgttaaggataataattaaggatcatatgaataattaatgaagatgctgatgactatgaataataaataattatcctgaggaga

SEQ ID NO: 774 - DNA, 3884 bp, Homo sapiens
  source 1..3884: mol_type = genomic DNA
  misc_feature 1..3884: note = cDNA of KCNH2 gene SNP c.3118A>G (p.Ser1040Gly)
atgccggtgcggaggggccacgtcgcgccgcagaacaccttcctggacaccatcatccgcaagtttgagggccagagccgtaagttcatcatcgccaacgctcgggtggagaactgcgccgtcatctactgcaacgacggcttctgcgagctgtgcggctactcgcgggccgaggtgatgcagcgaccctgcacctgcgacttcctgcacgggccgcgcacgcagcgccgcgctgccgcgcagatcgcgcaggcactgctgggcgccgaggagcgcaaagtggaaatcgccttctaccggaaagatgggagctgcttcctatgtctggtggatgtggtgcccgtgaagaacgaggatggggctgtcatcatgttcatcctcaatttcgaggtggtgatggagaaggacatggtggggtccccggctcatgacaccaaccaccggggcccccccaccagctggctggccccaggccgcgccaagaccttccgcctgaagctgcccgcgctgctggcgctgacggcccgggagtcgtcggtgcggtcgggcggcgcgggcggcgcgggcgccccgggggccgtggtggtggacgtggacctgacgcccgcggcacccagcagcgagtcgctggccctggacgaagtgacagccatggacaaccacgtggcagggctcgggcccgcggaggagcggcgtgcgctggtgggtcccggctctccgccccgcagcgcgcccggccagctcccatcgccccgggcgcacagcctcaaccccgacgcctcgggctccagctgcagcctggcccggacgcgctcccgagaaagctgcgccagcgtgcgccgcgcctcgtcggccgacgacatcgaggccatgcgcgccggggtgctgcccccgccaccgcgccacgccagcaccggggccatgcacccactgcgcagcggcttgctcaactccacctcggactccgacctcgtgcgctaccgcaccattagcaagattccccaaatcaccctcaactttgtggacctcaagggcgaccccttcttggcttcgcccaccagtgaccgtgagatcatagcacctaagataaaggagcgaacccacaatgtcactgagaaggtcacccaggtcctgtccctgggcgccgacgtgctgcctgagtacaagctgcaggcaccgcgcatccaccgctggaccatcctgcattacagccccttcaaggccgtgtgggactggctcatcctgctgctggtcatctacacggctgtcttcacaccctactcggctgccttcctgctgaaggagacggaagaaggcccgcctgctaccgagtgtggctacgcctgccagccgctggctgtggtggacctcatcgtggacatcatgttcattgtggacatcctcatcaacttccgcaccacctacgtcaatgccaacgaggaggtggtcagccaccccggccgcatcgccgtccactacttcaagggctggttcctcatcgacatggtggccgccatccccttcgacctgctcatcttcggctctggctctgaggagctgatcgggctgctgaagactgcgcggctgctgcggctggtgcgcgtggcgcggaagctggatcgctactcagagtacggcgcggccgtgctgttcttgctcatgtgcacctttgcgctcatcgcgcactggctagcctgcatctggtacgccatcggcaacatggagcagccacacatggactcacgcatcggctggctgcacaacctgggcgaccagataggcaaaccctacaacagcagcggcctgggcggcccctccatcaaggacaagtatgtgacggcgctctacttcaccttcagcagcctcaccagtgtgggcttcggcaacgtctctcccaacaccaactcagagaagatcttctccatctgcgtcatgctcattggctccctcatgtatgctagcatcttcggcaacgtgtcggccatcatccagcggctgtactcgggcacagcccgctaccacacacagatgctgcgggtgcgggagttcatccgcttccaccagatccccaatcccctgcgccagcgcctcgaggagtacttccagcacgcctggtcctacaccaacggcatcgacatgaacgcggtgctgaagggcttccctgagtgcctgcaggctgacatctgcctgcacctgaaccgctcactgctgcagcactgcaaacccttccgaggggccaccaagggctgccttcgggccctggccatgaagttcaagaccacacatgcaccgccaggggacacactggtgcatgctggggacctgctcaccgccctgtacttcatctcccggggctccatcgagatcctgcggggcgacgtcgtcgtggccatcctggggaagaatgacatctttggggagcctctgaacctgtatgcaaggcctggcaagtcgaacggggatgtgcgggccctcacctactgtgacctacacaagatccatcgggacgacctgctggaggtgctggacatgtaccctgagttctccgaccacttctggtccagcctggagatcaccttcaacctgcgagataccaacatgatcccgggctcccccggcagtacggagttagagggtggcttcagtcggcaacgcaagcgcaagttgtccttccgcaggcgcacggacaaggacacggagcagccaggggaggtgtcggccttggggccgggccgggcgggggcagggccgagtagccggggccggccgggggggccgtggggggagagcccgtccagtggcccctccagccctgagagcagtgaggatgagggcccaggccgcagctccagccccctccgcctggtgcccttctccagccccaggccccccggagagccgccgggtggggagcccctgatggaggactgcgagaagagcagcgacacttgcaaccccctgtcaggcgccttctcaggagtgtccaacattttcagcttctggggggacagtcggggccgccagtaccaggagctccctcgatgccccgcccccacccccagcctcctcaacatccccctctccagcccgggtcggcggccccggggcgacgtggagggcaggctggatgccctccagcgccagctcaacaggctggagacccggctgagtgcagacatggccactgtcctgcagctgctacagaggcagatgacgctggtcccgcccgcctacagtgctgtgaccaccccggggcctggccccacttccacatccccgctgttgcccgtcagccccctccccaccctcaccttggactcgctttctcaggtttcccagttcatggcgtgtgaggagctgcccccgggggccccagagcttccccaagaaggccccacacgacgcctctccctaccgggccagctgggggccctcacctcccagcccctgcacagacacggctcggacccgggcagttagtggggctgcccagtgtggacacgtggctcacccagggatcaaggcgctgctgggccgctccccttggaggccctgctcaggaggccctgaccgtggaaggggagaggaactcgaaagcacagctcctcccccagcccttgggaccatcttctcctgcagtcccctgggccccagtgagaggggcaggggcagggccggcagtaggtggggcctgtggtccccccactgccctgagggcattagctggtctaactgcccggaggcacccggccctgggccttaggcacctcaaggacttttctgctatttactgctcttattgttaaggataataattaaggatcatatgaataattaatgaagatgctgatgactatgaataataaataattatcctgaggaga

SEQ ID NO: 775 - DNA, 3884 bp, Homo sapiens
  source 1..3884: mol_type = genomic DNA
  misc_feature 1..3884: note = cDNA of KCNH2 gene SNP c.3119G>A (p.Ser1040Asn)
atgccggtgcggaggggccacgtcgcgccgcagaacaccttcctggacaccatcatccgcaagtttgagggccagagccgtaagttcatcatcgccaacgctcgggtggagaactgcgccgtcatctactgcaacgacggcttctgcgagctgtgcggctactcgcgggccgaggtgatgcagcgaccctgcacctgcgacttcctgcacgggccgcgcacgcagcgccgcgctgccgcgcagatcgcgcaggcactgctgggcgccgaggagcgcaaagtggaaatcgccttctaccggaaagatgggagctgcttcctatgtctggtggatgtggtgcccgtgaagaacgaggatggggctgtcatcatgttcatcctcaatttcgaggtggtgatggagaaggacatggtggggtccccggctcatgacaccaaccaccggggcccccccaccagctggctggccccaggccgcgccaagaccttccgcctgaagctgcccgcgctgctggcgctgacggcccgggagtcgtcggtgcggtcgggcggcgcgggcggcgcgggcgccccgggggccgtggtggtggacgtggacctgacgcccgcggcacccagcagcgagtcgctggccctggacgaagtgacagccatggacaaccacgtggcagggctcgggcccgcggaggagcggcgtgcgctggtgggtcccggctctccgccccgcagcgcgcccggccagctcccatcgccccgggcgcacagcctcaaccccgacgcctcgggctccagctgcagcctggcccggacgcgctcccgagaaagctgcgccagcgtgcgccgcgcctcgtcggccgacgacatcgaggccatgcgcgccggggtgctgcccccgccaccgcgccacgccagcaccggggccatgcacccactgcgcagcggcttgctcaactccacctcggactccgacctcgtgcgctaccgcaccattagcaagattccccaaatcaccctcaactttgtggacctcaagggcgaccccttcttggcttcgcccaccagtgaccgtgagatcatagcacctaagataaaggagcgaacccacaatgtcactgagaaggtcacccaggtcctgtccctgggcgccgacgtgctgcctgagtacaagctgcaggcaccgcgcatccaccgctggaccatcctgcattacagccccttcaaggccgtgtgggactggctcatcctgctgctggtcatctacacggctgtcttcacaccctactcggctgccttcctgctgaaggagacggaagaaggcccgcctgctaccgagtgtggctacgcctgccagccgctggctgtggtggacctcatcgtggacatcatgttcattgtggacatcctcatcaacttccgcaccacctacgtcaatgccaacgaggaggtggtcagccaccccggccgcatcgccgtccactacttcaagggctggttcctcatcgacatggtggccgccatccccttcgacctgctcatcttcggctctggctctgaggagctgatcgggctgctgaagactgcgcggctgctgcggctggtgcgcgtggcgcggaagctggatcgctactcagagtacggcgcggccgtgctgttcttgctcatgtgcacctttgcgctcatcgcgcactggctagcctgcatctggtacgccatcggcaacatggagcagccacacatggactcacgcatcggctggctgcacaacctgggcgaccagataggcaaaccctacaacagcagcggcctgggcggcccctccatcaaggacaagtatgtgacggcgctctacttcaccttcagcagcctcaccagtgtgggcttcggcaacgtctctcccaacaccaactcagagaagatcttctccatctgcgtcatgctcattggctccctcatgtatgctagcatcttcggcaacgtgtcggccatcatccagcggctgtactcgggcacagcccgctaccacacacagatgctgcgggtgcgggagttcatccgcttccaccagatccccaatcccctgcgccagcgcctcgaggagtacttccagcacgcctggtcctacaccaacggcatcgacatgaacgcggtgctgaagggcttccctgagtgcctgcaggctgacatctgcctgcacctgaaccgctcactgctgcagcactgcaaacccttccgaggggccaccaagggctgccttcgggccctggccatgaagttcaagaccacacatgcaccgccaggggacacactggtgcatgctggggacctgctcaccgccctgtacttcatctcccggggctccatcgagatcctgcggggcgacgtcgtcgtggccatcctggggaagaatgacatctttggggagcctctgaacctgtatgcaaggcctggcaagtcgaacggggatgtgcgggccctcacctactgtgacctacacaagatccatcgggacgacctgctggaggtgctggacatgtaccctgagttctccgaccacttctggtccagcctggagatcaccttcaacctgcgagataccaacatgatcccgggctcccccggcagtacggagttagagggtggcttcagtcggcaacgcaagcgcaagttgtccttccgcaggcgcacggacaaggacacggagcagccaggggaggtgtcggccttggggccgggccgggcgggggcagggccgagtagccggggccggccgggggggccgtggggggagagcccgtccagtggcccctccagccctgagagcagtgaggatgagggcccaggccgcagctccagccccctccgcctggtgcccttctccagccccaggccccccggagagccgccgggtggggagcccctgatggaggactgcgagaagagcagcgacacttgcaaccccctgtcaggcgccttctcaggagtgtccaacattttcagcttctggggggacagtcggggccgccagtaccaggagctccctcgatgccccgcccccacccccagcctcctcaacatccccctctccagcccgggtcggcggccccggggcgacgtggagaacaggctggatgccctccagcgccagctcaacaggctggagacccggctgagtgcagacatggccactgtcctgcagctgctacagaggcagatgacgctggtcccgcccgcctacagtgctgtgaccaccccggggcctggccccacttccacatccccgctgttgcccgtcagccccctccccaccctcaccttggactcgctttctcaggtttcccagttcatggcgtgtgaggagctgcccccgggggccccagagcttccccaagaaggccccacacgacgcctctccctaccgggccagctgggggccctcacctcccagcccctgcacagacacggctcggacccgggcagttagtggggctgcccagtgtggacacgtggctcacccagggatcaaggcgctgctgggccgctccccttggaggccctgctcaggaggccctgaccgtggaaggggagaggaactcgaaagcacagctcctcccccagcccttgggaccatcttctcctgcagtcccctgggccccagtgagaggggcaggggcagggccggcagtaggtggggcctgtggtccccccactgccctgagggcattagctggtctaactgcccggaggcacccggccctgggccttaggcacctcaaggacttttctgctatttactgctcttattgttaaggataataattaaggatcatatgaataattaatgaagatgctgatgactatgaataataaataattatcctgaggaga

SEQ ID NO: 776 - DNA, 3884 bp, Homo sapiens
  source 1..3884: mol_type = genomic DNA
  misc_feature 1..3884: note = cDNA of KCNH2 gene SNP c.3124C>G (p.Leu1042Val)
atgccggtgcggaggggccacgtcgcgccgcagaacaccttcctggacaccatcatccgcaagtttgagggccagagccgtaagttcatcatcgccaacgctcgggtggagaactgcgccgtcatctactgcaacgacggcttctgcgagctgtgcggctactcgcgggccgaggtgatgcagcgaccctgcacctgcgacttcctgcacgggccgcgcacgcagcgccgcgctgccgcgcagatcgcgcaggcactgctgggcgccgaggagcgcaaagtggaaatcgccttctaccggaaagatgggagctgcttcctatgtctggtggatgtggtgcccgtgaagaacgaggatggggctgtcatcatgttcatcctcaatttcgaggtggtgatggagaaggacatggtggggtccccggctcatgacaccaaccaccggggcccccccaccagctggctggccccaggccgcgccaagaccttccgcctgaagctgcccgcgctgctggcgctgacggcccgggagtcgtcggtgcggtcgggcggcgcgggcggcgcgggcgccccgggggccgtggtggtggacgtggacctgacgcccgcggcacccagcagcgagtcgctggccctggacgaagtgacagccatggacaaccacgtggcagggctcgggcccgcggaggagcggcgtgcgctggtgggtcccggctctccgccccgcagcgcgcccggccagctcccatcgccccgggcgcacagcctcaaccccgacgcctcgggctccagctgcagcctggcccggacgcgctcccgagaaagctgcgccagcgtgcgccgcgcctcgtcggccgacgacatcgaggccatgcgcgccggggtgctgcccccgccaccgcgccacgccagcaccggggccatgcacccactgcgcagcggcttgctcaactccacctcggactccgacctcgtgcgctaccgcaccattagcaagattccccaaatcaccctcaactttgtggacctcaagggcgaccccttcttggcttcgcccaccagtgaccgtgagatcatagcacctaagataaaggagcgaacccacaatgtcactgagaaggtcacccaggtcctgtccctgggcgccgacgtgctgcctgagtacaagctgcaggcaccgcgcatccaccgctggaccatcctgcattacagccccttcaaggccgtgtgggactggctcatcctgctgctggtcatctacacggctgtcttcacaccctactcggctgccttcctgctgaaggagacggaagaaggcccgcctgctaccgagtgtggctacgcctgccagccgctggctgtggtggacctcatcgtggacatcatgttcattgtggacatcctcatcaacttccgcaccacctacgtcaatgccaacgaggaggtggtcagccaccccggccgcatcgccgtccactacttcaagggctggttcctcatcgacatggtggccgccatccccttcgacctgctcatcttcggctctggctctgaggagctgatcgggctgctgaagactgcgcggctgctgcggctggtgcgcgtggcgcggaagctggatcgctactcagagtacggcgcggccgtgctgttcttgctcatgtgcacctttgcgctcatcgcgcactggctagcctgcatctggtacgccatcggcaacatggagcagccacacatggactcacgcatcggctggctgcacaacctgggcgaccagataggcaaaccctacaacagcagcggcctgggcggcccctccatcaaggacaagtatgtgacggcgctctacttcaccttcagcagcctcaccagtgtgggcttcggcaacgtctctcccaacaccaactcagagaagatcttctccatctgcgtcatgctcattggctccctcatgtatgctagcatcttcggcaacgtgtcggccatcatccagcggctgtactcgggcacagcccgctaccacacacagatgctgcgggtgcgggagttcatccgcttccaccagatccccaatcccctgcgccagcgcctcgaggagtacttccagcacgcctggtcctacaccaacggcatcgacatgaacgcggtgctgaagggcttccctgagtgcctgcaggctgacatctgcctgcacctgaaccgctcactgctgcagcactgcaaacccttccgaggggccaccaagggctgccttcgggccctggccatgaagttcaagaccacacatgcaccgccaggggacacactggtgcatgctggggacctgctcaccgccctgtacttcatctcccggggctccatcgagatcctgcggggcgacgtcgtcgtggccatcctggggaagaatgacatctttggggagcctctgaacctgtatgcaaggcctggcaagtcgaacggggatgtgcgggccctcacctactgtgacctacacaagatccatcgggacgacctgctggaggtgctggacatgtaccctgagttctccgaccacttctggtccagcctggagatcaccttcaacctgcgagataccaacatgatcccgggctcccccggcagtacggagttagagggtggcttcagtcggcaacgcaagcgcaagttgtccttccgcaggcgcacggacaaggacacggagcagccaggggaggtgtcggccttggggccgggccgggcgggggcagggccgagtagccggggccggccgggggggccgtggggggagagcccgtccagtggcccctccagccctgagagcagtgaggatgagggcccaggccgcagctccagccccctccgcctggtgcccttctccagccccaggccccccggagagccgccgggtggggagcccctgatggaggactgcgagaagagcagcgacacttgcaaccccctgtcaggcgccttctcaggagtgtccaacattttcagcttctggggggacagtcggggccgccagtaccaggagctccctcgatgccccgcccccacccccagcctcctcaacatccccctctccagcccgggtcggcggccccggggcgacgtggagagcagggtggatgccctccagcgccagctcaacaggctggagacccggctgagtgcagacatggccactgtcctgcagctgctacagaggcagatgacgctggtcccgcccgcctacagtgctgtgaccaccccggggcctggccccacttccacatccccgctgttgcccgtcagccccctccccaccctcaccttggactcgctttctcaggtttcccagttcatggcgtgtgaggagctgcccccgggggccccagagcttccccaagaaggccccacacgacgcctctccctaccgggccagctgggggccctcacctcccagcccctgcacagacacggctcggacccgggcagttagtggggctgcccagtgtggacacgtggctcacccagggatcaaggcgctgctgggccgctccccttggaggccctgctcaggaggccctgaccgtggaaggggagaggaactcgaaagcacagctcctcccccagcccttgggaccatcttctcctgcagtcccctgggccccagtgagaggggcaggggcagggccggcagtaggtggggcctgtggtccccccactgccctgagggcattagctggtctaactgcccggaggcacccggccctgggccttaggcacctcaaggacttttctgctatttactgctcttattgttaaggataataattaaggatcatatgaataattaatgaagatgctgatgactatgaataataaataattatcctgaggaga

SEQ ID NO: 777 - DNA, 3884 bp, Homo sapiens
  source 1..3884: mol_type = genomic DNA
  misc_feature 1..3884: note = cDNA of KCNH2 gene SNP c.3125T>C (p.Leu1042Pro)
atgccggtgcggaggggccacgtcgcgccgcagaacaccttcctggacaccatcatccgcaagtttgagggccagagccgtaagttcatcatcgccaacgctcgggtggagaactgcgccgtcatctactgcaacgacggcttctgcgagctgtgcggctactcgcgggccgaggtgatgcagcgaccctgcacctgcgacttcctgcacgggccgcgcacgcagcgccgcgctgccgcgcagatcgcgcaggcactgctgggcgccgaggagcgcaaagtggaaatcgccttctaccggaaagatgggagctgcttcctatgtctggtggatgtggtgcccgtgaagaacgaggatggggctgtcatcatgttcatcctcaatttcgaggtggtgatggagaaggacatggtggggtccccggctcatgacaccaaccaccggggcccccccaccagctggctggccccaggccgcgccaagaccttccgcctgaagctgcccgcgctgctggcgctgacggcccgggagtcgtcggtgcggtcgggcggcgcgggcggcgcgggcgccccgggggccgtggtggtggacgtggacctgacgcccgcggcacccagcagcgagtcgctggccctggacgaagtgacagccatggacaaccacgtggcagggctcgggcccgcggaggagcggcgtgcgctggtgggtcccggctctccgccccgcagcgcgcccggccagctcccatcgccccgggcgcacagcctcaaccccgacgcctcgggctccagctgcagcctggcccggacgcgctcccgagaaagctgcgccagcgtgcgccgcgcctcgtcggccgacgacatcgaggccatgcgcgccggggtgctgcccccgccaccgcgccacgccagcaccggggccatgcacccactgcgcagcggcttgctcaactccacctcggactccgacctcgtgcgctaccgcaccattagcaagattccccaaatcaccctcaactttgtggacctcaagggcgaccccttcttggcttcgcccaccagtgaccgtgagatcatagcacctaagataaaggagcgaacccacaatgtcactgagaaggtcacccaggtcctgtccctgggcgccgacgtgctgcctgagtacaagctgcaggcaccgcgcatccaccgctggaccatcctgcattacagccccttcaaggccgtgtgggactggctcatcctgctgctggtcatctacacggctgtcttcacaccctactcggctgccttcctgctgaaggagacggaagaaggcccgcctgctaccgagtgtggctacgcctgccagccgctggctgtggtggacctcatcgtggacatcatgttcattgtggacatcctcatcaacttccgcaccacctacgtcaatgccaacgaggaggtggtcagccaccccggccgcatcgccgtccactacttcaagggctggttcctcatcgacatggtggccgccatccccttcgacctgctcatcttcggctctggctctgaggagctgatcgggctgctgaagactgcgcggctgctgcggctggtgcgcgtggcgcggaagctggatcgctactcagagtacggcgcggccgtgctgttcttgctcatgtgcacctttgcgctcatcgcgcactggctagcctgcatctggtacgccatcggcaacatggagcagccacacatggactcacgcatcggctggctgcacaacctgggcgaccagataggcaaaccctacaacagcagcggcctgggcggcccctccatcaaggacaagtatgtgacggcgctctacttcaccttcagcagcctcaccagtgtgggcttcggcaacgtctctcccaacaccaactcagagaagatcttctccatctgcgtcatgctcattggctccctcatgtatgctagcatcttcggcaacgtgtcggccatcatccagcggctgtactcgggcacagcccgctaccacacacagatgctgcgggtgcgggagttcatccgcttccaccagatccccaatcccctgcgccagcgcctcgaggagtacttccagcacgcctggtcctacaccaacggcatcgacatgaacgcggtgctgaagggcttccctgagtgcctgcaggctgacatctgcctgcacctgaaccgctcactgctgcagcactgcaaacccttccgaggggccaccaagggctgccttcgggccctggccatgaagttcaagaccacacatgcaccgccaggggacacactggtgcatgctggggacctgctcaccgccctgtacttcatctcccggggctccatcgagatcctgcggggcgacgtcgtcgtggccatcctggggaagaatgacatctttggggagcctctgaacctgtatgcaaggcctggcaagtcgaacggggatgtgcgggccctcacctactgtgacctacacaagatccatcgggacgacctgctggaggtgctggacatgtaccctgagttctccgaccacttctggtccagcctggagatcaccttcaacctgcgagataccaacatgatcccgggctcccccggcagtacggagttagagggtggcttcagtcggcaacgcaagcgcaagttgtccttccgcaggcgcacggacaaggacacggagcagccaggggaggtgtcggccttggggccgggccgggcgggggcagggccgagtagccggggccggccgggggggccgtggggggagagcccgtccagtggcccctccagccctgagagcagtgaggatgagggcccaggccgcagctccagccccctccgcctggtgcccttctccagccccaggccccccggagagccgccgggtggggagcccctgatggaggactgcgagaagagcagcgacacttgcaaccccctgtcaggcgccttctcaggagtgtccaacattttcagcttctggggggacagtcggggccgccagtaccaggagctccctcgatgccccgcccccacccccagcctcctcaacatccccctctccagcccgggtcggcggccccggggcgacgtggagagcaggccggatgccctccagcgccagctcaacaggctggagacccggctgagtgcagacatggccactgtcctgcagctgctacagaggcagatgacgctggtcccgcccgcctacagtgctgtgaccaccccggggcctggccccacttccacatccccgctgttgcccgtcagccccctccccaccctcaccttggactcgctttctcaggtttcccagttcatggcgtgtgaggagctgcccccgggggccccagagcttccccaagaaggccccacacgacgcctctccctaccgggccagctgggggccctcacctcccagcccctgcacagacacggctcggacccgggcagttagtggggctgcccagtgtggacacgtggctcacccagggatcaaggcgctgctgggccgctccccttggaggccctgctcaggaggccctgaccgtggaaggggagaggaactcgaaagcacagctcctcccccagcccttgggaccatcttctcctgcagtcccctgggccccagtgagaggggcaggggcagggccggcagtaggtggggcctgtggtccccccactgccctgagggcattagctggtctaactgcccggaggcacccggccctgggccttaggcacctcaaggacttttctgctatttactgctcttattgttaaggataataattaaggatcatatgaataattaatgaagatgctgatgactatgaataataaataattatcctgaggaga

SEQ ID NO: 778 - DNA, 3884 bp, Homo sapiens
  source 1..3884: mol_type = genomic DNA
  misc_feature 1..3884: note = cDNA of KCNH2 gene SNP c.312C>G (p.Ser104Arg)
atgccggtgcggaggggccacgtcgcgccgcagaacaccttcctggacaccatcatccgcaagtttgagggccagagccgtaagttcatcatcgccaacgctcgggtggagaactgcgccgtcatctactgcaacgacggcttctgcgagctgtgcggctactcgcgggccgaggtgatgcagcgaccctgcacctgcgacttcctgcacgggccgcgcacgcagcgccgcgctgccgcgcagatcgcgcaggcactgctgggcgccgaggagcgcaaagtggaaatcgccttctaccggaaagatgggaggtgcttcctatgtctggtggatgtggtgcccgtgaagaacgaggatggggctgtcatcatgttcatcctcaatttcgaggtggtgatggagaaggacatggtggggtccccggctcatgacaccaaccaccggggcccccccaccagctggctggccccaggccgcgccaagaccttccgcctgaagctgcccgcgctgctggcgctgacggcccgggagtcgtcggtgcggtcgggcggcgcgggcggcgcgggcgccccgggggccgtggtggtggacgtggacctgacgcccgcggcacccagcagcgagtcgctggccctggacgaagtgacagccatggacaaccacgtggcagggctcgggcccgcggaggagcggcgtgcgctggtgggtcccggctctccgccccgcagcgcgcccggccagctcccatcgccccgggcgcacagcctcaaccccgacgcctcgggctccagctgcagcctggcccggacgcgctcccgagaaagctgcgccagcgtgcgccgcgcctcgtcggccgacgacatcgaggccatgcgcgccggggtgctgcccccgccaccgcgccacgccagcaccggggccatgcacccactgcgcagcggcttgctcaactccacctcggactccgacctcgtgcgctaccgcaccattagcaagattccccaaatcaccctcaactttgtggacctcaagggcgaccccttcttggcttcgcccaccagtgaccgtgagatcatagcacctaagataaaggagcgaacccacaatgtcactgagaaggtcacccaggtcctgtccctgggcgccgacgtgctgcctgagtacaagctgcaggcaccgcgcatccaccgctggaccatcctgcattacagccccttcaaggccgtgtgggactggctcatcctgctgctggtcatctacacggctgtcttcacaccctactcggctgccttcctgctgaaggagacggaagaaggcccgcctgctaccgagtgtggctacgcctgccagccgctggctgtggtggacctcatcgtggacatcatgttcattgtggacatcctcatcaacttccgcaccacctacgtcaatgccaacgaggaggtggtcagccaccccggccgcatcgccgtccactacttcaagggctggttcctcatcgacatggtggccgccatccccttcgacctgctcatcttcggctctggctctgaggagctgatcgggctgctgaagactgcgcggctgctgcggctggtgcgcgtggcgcggaagctggatcgctactcagagtacggcgcggccgtgctgttcttgctcatgtgcacctttgcgctcatcgcgcactggctagcctgcatctggtacgccatcggcaacatggagcagccacacatggactcacgcatcggctggctgcacaacctgggcgaccagataggcaaaccctacaacagcagcggcctgggcggcccctccatcaaggacaagtatgtgacggcgctctacttcaccttcagcagcctcaccagtgtgggcttcggcaacgtctctcccaacaccaactcagagaagatcttctccatctgcgtcatgctcattggctccctcatgtatgctagcatcttcggcaacgtgtcggccatcatccagcggctgtactcgggcacagcccgctaccacacacagatgctgcgggtgcgggagttcatccgcttccaccagatccccaatcccctgcgccagcgcctcgaggagtacttccagcacgcctggtcctacaccaacggcatcgacatgaacgcggtgctgaagggcttccctgagtgcctgcaggctgacatctgcctgcacctgaaccgctcactgctgcagcactgcaaacccttccgaggggccaccaagggctgccttcgggccctggccatgaagttcaagaccacacatgcaccgccaggggacacactggtgcatgctggggacctgctcaccgccctgtacttcatctcccggggctccatcgagatcctgcggggcgacgtcgtcgtggccatcctggggaagaatgacatctttggggagcctctgaacctgtatgcaaggcctggcaagtcgaacggggatgtgcgggccctcacctactgtgacctacacaagatccatcgggacgacctgctggaggtgctggacatgtaccctgagttctccgaccacttctggtccagcctggagatcaccttcaacctgcgagataccaacatgatcccgggctcccccggcagtacggagttagagggtggcttcagtcggcaacgcaagcgcaagttgtccttccgcaggcgcacggacaaggacacggagcagccaggggaggtgtcggccttggggccgggccgggcgggggcagggccgagtagccggggccggccgggggggccgtggggggagagcccgtccagtggcccctccagccctgagagcagtgaggatgagggcccaggccgcagctccagccccctccgcctggtgcccttctccagccccaggccccccggagagccgccgggtggggagcccctgatggaggactgcgagaagagcagcgacacttgcaaccccctgtcaggcgccttctcaggagtgtccaacattttcagcttctggggggacagtcggggccgccagtaccaggagctccctcgatgccccgcccccacccccagcctcctcaacatccccctctccagcccgggtcggcggccccggggcgacgtggagagcaggctggatgccctccagcgccagctcaacaggctggagacccggctgagtgcagacatggccactgtcctgcagctgctacagaggcagatgacgctggtcccgcccgcctacagtgctgtgaccaccccggggcctggccccacttccacatccccgctgttgcccgtcagccccctccccaccctcaccttggactcgctttctcaggtttcccagttcatggcgtgtgaggagctgcccccgggggccccagagcttccccaagaaggccccacacgacgcctctccctaccgggccagctgggggccctcacctcccagcccctgcacagacacggctcggacccgggcagttagtggggctgcccagtgtggacacgtggctcacccagggatcaaggcgctgctgggccgctccccttggaggccctgctcaggaggccctgaccgtggaaggggagaggaactcgaaagcacagctcctcccccagcccttgggaccatcttctcctgcagtcccctgggccccagtgagaggggcaggggcagggccggcagtaggtggggcctgtggtccccccactgccctgagggcattagctggtctaactgcccggaggcacccggccctgggccttaggcacctcaaggacttttctgctatttactgctcttattgttaaggataataattaaggatcatatgaataattaatgaagatgctgatgactatgaataataaataattatcctgaggaga

SEQ ID NO: 779 - DNA, 3884 bp, Homo sapiens
  source 1..3884: mol_type = genomic DNA
  misc_feature 1..3884: note = cDNA of KCNH2 gene SNP c.3133C>T (p.Leu1045Phe)
atgccggtgcggaggggccacgtcgcgccgcagaacaccttcctggacaccatcatccgcaagtttgagggccagagccgtaagttcatcatcgccaacgctcgggtggagaactgcgccgtcatctactgcaacgacggcttctgcgagctgtgcggctactcgcgggccgaggtgatgcagcgaccctgcacctgcgacttcctgcacgggccgcgcacgcagcgccgcgctgccgcgcagatcgcgcaggcactgctgggcgccgaggagcgcaaagtggaaatcgccttctaccggaaagatgggagctgcttcctatgtctggtggatgtggtgcccgtgaagaacgaggatggggctgtcatcatgttcatcctcaatttcgaggtggtgatggagaaggacatggtggggtccccggctcatgacaccaaccaccggggcccccccaccagctggctggccccaggccgcgccaagaccttccgcctgaagctgcccgcgctgctggcgctgacggcccgggagtcgtcggtgcggtcgggcggcgcgggcggcgcgggcgccccgggggccgtggtggtggacgtggacctgacgcccgcggcacccagcagcgagtcgctggccctggacgaagtgacagccatggacaaccacgtggcagggctcgggcccgcggaggagcggcgtgcgctggtgggtcccggctctccgccccgcagcgcgcccggccagctcccatcgccccgggcgcacagcctcaaccccgacgcctcgggctccagctgcagcctggcccggacgcgctcccgagaaagctgcgccagcgtgcgccgcgcctcgtcggccgacgacatcgaggccatgcgcgccggggtgctgcccccgccaccgcgccacgccagcaccggggccatgcacccactgcgcagcggcttgctcaactccacctcggactccgacctcgtgcgctaccgcaccattagcaagattccccaaatcaccctcaactttgtggacctcaagggcgaccccttcttggcttcgcccaccagtgaccgtgagatcatagcacctaagataaaggagcgaacccacaatgtcactgagaaggtcacccaggtcctgtccctgggcgccgacgtgctgcctgagtacaagctgcaggcaccgcgcatccaccgctggaccatcctgcattacagccccttcaaggccgtgtgggactggctcatcctgctgctggtcatctacacggctgtcttcacaccctactcggctgccttcctgctgaaggagacggaagaaggcccgcctgctaccgagtgtggctacgcctgccagccgctggctgtggtggacctcatcgtggacatcatgttcattgtggacatcctcatcaacttccgcaccacctacgtcaatgccaacgaggaggtggtcagccaccccggccgcatcgccgtccactacttcaagggctggttcctcatcgacatggtggccgccatccccttcgacctgctcatcttcggctctggctctgaggagctgatcgggctgctgaagactgcgcggctgctgcggctggtgcgcgtggcgcggaagctggatcgctactcagagtacggcgcggccgtgctgttcttgctcatgtgcacctttgcgctcatcgcgcactggctagcctgcatctggtacgccatcggcaacatggagcagccacacatggactcacgcatcggctggctgcacaacctgggcgaccagataggcaaaccctacaacagcagcggcctgggcggcccctccatcaaggacaagtatgtgacggcgctctacttcaccttcagcagcctcaccagtgtgggcttcggcaacgtctctcccaacaccaactcagagaagatcttctccatctgcgtcatgctcattggctccctcatgtatgctagcatcttcggcaacgtgtcggccatcatccagcggctgtactcgggcacagcccgctaccacacacagatgctgcgggtgcgggagttcatccgcttccaccagatccccaatcccctgcgccagcgcctcgaggagtacttccagcacgcctggtcctacaccaacggcatcgacatgaacgcggtgctgaagggcttccctgagtgcctgcaggctgacatctgcctgcacctgaaccgctcactgctgcagcactgcaaacccttccgaggggccaccaagggctgccttcgggccctggccatgaagttcaagaccacacatgcaccgccaggggacacactggtgcatgctggggacctgctcaccgccctgtacttcatctcccggggctccatcgagatcctgcggggcgacgtcgtcgtggccatcctggggaagaatgacatctttggggagcctctgaacctgtatgcaaggcctggcaagtcgaacggggatgtgcgggccctcacctactgtgacctacacaagatccatcgggacgacctgctggaggtgctggacatgtaccctgagttctccgaccacttctggtccagcctggagatcaccttcaacctgcgagataccaacatgatcccgggctcccccggcagtacggagttagagggtggcttcagtcggcaacgcaagcgcaagttgtccttccgcaggcgcacggacaaggacacggagcagccaggggaggtgtcggccttggggccgggccgggcgggggcagggccgagtagccggggccggccgggggggccgtggggggagagcccgtccagtggcccctccagccctgagagcagtgaggatgagggcccaggccgcagctccagccccctccgcctggtgcccttctccagccccaggccccccggagagccgccgggtggggagcccctgatggaggactgcgagaagagcagcgacacttgcaaccccctgtcaggcgccttctcaggagtgtccaacattttcagcttctggggggacagtcggggccgccagtaccaggagctccctcgatgccccgcccccacccccagcctcctcaacatccccctctccagcccgggtcggcggccccggggcgacgtggagagcaggctggatgccttccagcgccagctcaacaggctggagacccggctgagtgcagacatggccactgtcctgcagctgctacagaggcagatgacgctggtcccgcccgcctacagtgctgtgaccaccccggggcctggccccacttccacatccccgctgttgcccgtcagccccctccccaccctcaccttggactcgctttctcaggtttcccagttcatggcgtgtgaggagctgcccccgggggccccagagcttccccaagaaggccccacacgacgcctctccctaccgggccagctgggggccctcacctcccagcccctgcacagacacggctcggacccgggcagttagtggggctgcccagtgtggacacgtggctcacccagggatcaaggcgctgctgggccgctccccttggaggccctgctcaggaggccctgaccgtggaaggggagaggaactcgaaagcacagctcctcccccagcccttgggaccatcttctcctgcagtcccctgggccccagtgagaggggcaggggcagggccggcagtaggtggggcctgtggtccccccactgccctgagggcattagctggtctaactgcccggaggcacccggccctgggccttaggcacctcaaggacttttctgctatttactgctcttattgttaaggataataattaaggatcatatgaataattaatgaagatgctgatgactatgaataataaataattatcctgaggaga

SEQ ID NO: 780 - DNA, 3884 bp, Homo sapiens
  source 1..3884: mol_type = genomic DNA
  misc_feature 1..3884: note = cDNA of KCNH2 gene SNP c.3134T>G (p.Leu1045Arg)
atgccggtgcggaggggccacgtcgcgccgcagaacaccttcctggacaccatcatccgcaagtttgagggccagagccgtaagttcatcatcgccaacgctcgggtggagaactgcgccgtcatctactgcaacgacggcttctgcgagctgtgcggctactcgcgggccgaggtgatgcagcgaccctgcacctgcgacttcctgcacgggccgcgcacgcagcgccgcgctgccgcgcagatcgcgcaggcactgctgggcgccgaggagcgcaaagtggaaatcgccttctaccggaaagatgggagctgcttcctatgtctggtggatgtggtgcccgtgaagaacgaggatggggctgtcatcatgttcatcctcaatttcgaggtggtgatggagaaggacatggtggggtccccggctcatgacaccaaccaccggggcccccccaccagctggctggccccaggccgcgccaagaccttccgcctgaagctgcccgcgctgctggcgctgacggcccgggagtcgtcggtgcggtcgggcggcgcgggcggcgcgggcgccccgggggccgtggtggtggacgtggacctgacgcccgcggcacccagcagcgagtcgctggccctggacgaagtgacagccatggacaaccacgtggcagggctcgggcccgcggaggagcggcgtgcgctggtgggtcccggctctccgccccgcagcgcgcccggccagctcccatcgccccgggcgcacagcctcaaccccgacgcctcgggctccagctgcagcctggcccggacgcgctcccgagaaagctgcgccagcgtgcgccgcgcctcgtcggccgacgacatcgaggccatgcgcgccggggtgctgcccccgccaccgcgccacgccagcaccggggccatgcacccactgcgcagcggcttgctcaactccacctcggactccgacctcgtgcgctaccgcaccattagcaagattccccaaatcaccctcaactttgtggacctcaagggcgaccccttcttggcttcgcccaccagtgaccgtgagatcatagcacctaagataaaggagcgaacccacaatgtcactgagaaggtcacccaggtcctgtccctgggcgccgacgtgctgcctgagtacaagctgcaggcaccgcgcatccaccgctggaccatcctgcattacagccccttcaaggccgtgtgggactggctcatcctgctgctggtcatctacacggctgtcttcacaccctactcggctgccttcctgctgaaggagacggaagaaggcccgcctgctaccgagtgtggctacgcctgccagccgctggctgtggtggacctcatcgtggacatcatgttcattgtggacatcctcatcaacttccgcaccacctacgtcaatgccaacgaggaggtggtcagccaccccggccgcatcgccgtccactacttcaagggctggttcctcatcgacatggtggccgccatccccttcgacctgctcatcttcggctctggctctgaggagctgatcgggctgctgaagactgcgcggctgctgcggctggtgcgcgtggcgcggaagctggatcgctactcagagtacggcgcggccgtgctgttcttgctcatgtgcacctttgcgctcatcgcgcactggctagcctgcatctggtacgccatcggcaacatggagcagccacacatggactcacgcatcggctggctgcacaacctgggcgaccagataggcaaaccctacaacagcagcggcctgggcggcccctccatcaaggacaagtatgtgacggcgctctacttcaccttcagcagcctcaccagtgtgggcttcggcaacgtctctcccaacaccaactcagagaagatcttctccatctgcgtcatgctcattggctccctcatgtatgctagcatcttcggcaacgtgtcggccatcatccagcggctgtactcgggcacagcccgctaccacacacagatgctgcgggtgcgggagttcatccgcttccaccagatccccaatcccctgcgccagcgcctcgaggagtacttccagcacgcctggtcctacaccaacggcatcgacatgaacgcggtgctgaagggcttccctgagtgcctgcaggctgacatctgcctgcacctgaaccgctcactgctgcagcactgcaaacccttccgaggggccaccaagggctgccttcgggccctggccatgaagttcaagaccacacatgcaccgccaggggacacactggtgcatgctggggacctgctcaccgccctgtacttcatctcccggggctccatcgagatcctgcggggcgacgtcgtcgtggccatcctggggaagaatgacatctttggggagcctctgaacctgtatgcaaggcctggcaagtcgaacggggatgtgcgggccctcacctactgtgacctacacaagatccatcgggacgacctgctggaggtgctggacatgtaccctgagttctccgaccacttctggtccagcctggagatcaccttcaacctgcgagataccaacatgatcccgggctcccccggcagtacggagttagagggtggcttcagtcggcaacgcaagcgcaagttgtccttccgcaggcgcacggacaaggacacggagcagccaggggaggtgtcggccttggggccgggccgggcgggggcagggccgagtagccggggccggccgggggggccgtggggggagagcccgtccagtggcccctccagccctgagagcagtgaggatgagggcccaggccgcagctccagccccctccgcctggtgcccttctccagccccaggccccccggagagccgccgggtggggagcccctgatggaggactgcgagaagagcagcgacacttgcaaccccctgtcaggcgccttctcaggagtgtccaacattttcagcttctggggggacagtcggggccgccagtaccaggagctccctcgatgccccgcccccacccccagcctcctcaacatccccctctccagcccgggtcggcggccccggggcgacgtggagagcaggctggatgcccgccagcgccagctcaacaggctggagacccggctgagtgcagacatggccactgtcctgcagctgctacagaggcagatgacgctggtcccgcccgcctacagtgctgtgaccaccccggggcctggccccacttccacatccccgctgttgcccgtcagccccctccccaccctcaccttggactcgctttctcaggtttcccagttcatggcgtgtgaggagctgcccccgggggccccagagcttccccaagaaggccccacacgacgcctctccctaccgggccagctgggggccctcacctcccagcccctgcacagacacggctcggacccgggcagttagtggggctgcccagtgtggacacgtggctcacccagggatcaaggcgctgctgggccgctccccttggaggccctgctcaggaggccctgaccgtggaaggggagaggaactcgaaagcacagctcctcccccagcccttgggaccatcttctcctgcagtcccctgggccccagtgagaggggcaggggcagggccggcagtaggtggggcctgtggtccccccactgccctgagggcattagctggtctaactgcccggaggcacccggccctgggccttaggcacctcaaggacttttctgctatttactgctcttattgttaaggataataattaaggatcatatgaataattaatgaagatgctgatgactatgaataataaataattatcctgaggaga

SEQ ID NO: 781 - DNA, 3884 bp, Homo sapiens
  source 1..3884: mol_type = genomic DNA
  misc_feature 1..3884: note = cDNA of KCNH2 gene SNP c.3137A>G (p.Gln1046Arg)
atgccggtgcggaggggccacgtcgcgccgcagaacaccttcctggacaccatcatccgcaagtttgagggccagagccgtaagttcatcatcgccaacgctcgggtggagaactgcgccgtcatctactgcaacgacggcttctgcgagctgtgcggctactcgcgggccgaggtgatgcagcgaccctgcacctgcgacttcctgcacgggccgcgcacgcagcgccgcgctgccgcgcagatcgcgcaggcactgctgggcgccgaggagcgcaaagtggaaatcgccttctaccggaaagatgggagctgcttcctatgtctggtggatgtggtgcccgtgaagaacgaggatggggctgtcatcatgttcatcctcaatttcgaggtggtgatggagaaggacatggtggggtccccggctcatgacaccaaccaccggggcccccccaccagctggctggccccaggccgcgccaagaccttccgcctgaagctgcccgcgctgctggcgctgacggcccgggagtcgtcggtgcggtcgggcggcgcgggcggcgcgggcgccccgggggccgtggtggtggacgtggacctgacgcccgcggcacccagcagcgagtcgctggccctggacgaagtgacagccatggacaaccacgtggcagggctcgggcccgcggaggagcggcgtgcgctggtgggtcccggctctccgccccgcagcgcgcccggccagctcccatcgccccgggcgcacagcctcaaccccgacgcctcgggctccagctgcagcctggcccggacgcgctcccgagaaagctgcgccagcgtgcgccgcgcctcgtcggccgacgacatcgaggccatgcgcgccggggtgctgcccccgccaccgcgccacgccagcaccggggccatgcacccactgcgcagcggcttgctcaactccacctcggactccgacctcgtgcgctaccgcaccattagcaagattccccaaatcaccctcaactttgtggacctcaagggcgaccccttcttggcttcgcccaccagtgaccgtgagatcatagcacctaagataaaggagcgaacccacaatgtcactgagaaggtcacccaggtcctgtccctgggcgccgacgtgctgcctgagtacaagctgcaggcaccgcgcatccaccgctggaccatcctgcattacagccccttcaaggccgtgtgggactggctcatcctgctgctggtcatctacacggctgtcttcacaccctactcggctgccttcctgctgaaggagacggaagaaggcccgcctgctaccgagtgtggctacgcctgccagccgctggctgtggtggacctcatcgtggacatcatgttcattgtggacatcctcatcaacttccgcaccacctacgtcaatgccaacgaggaggtggtcagccaccccggccgcatcgccgtccactacttcaagggctggttcctcatcgacatggtggccgccatccccttcgacctgctcatcttcggctctggctctgaggagctgatcgggctgctgaagactgcgcggctgctgcggctggtgcgcgtggcgcggaagctggatcgctactcagagtacggcgcggccgtgctgttcttgctcatgtgcacctttgcgctcatcgcgcactggctagcctgcatctggtacgccatcggcaacatggagcagccacacatggactcacgcatcggctggctgcacaacctgggcgaccagataggcaaaccctacaacagcagcggcctgggcggcccctccatcaaggacaagtatgtgacggcgctctacttcaccttcagcagcctcaccagtgtgggcttcggcaacgtctctcccaacaccaactcagagaagatcttctccatctgcgtcatgctcattggctccctcatgtatgctagcatcttcggcaacgtgtcggccatcatccagcggctgtactcgggcacagcccgctaccacacacagatgctgcgggtgcgggagttcatccgcttccaccagatccccaatcccctgcgccagcgcctcgaggagtacttccagcacgcctggtcctacaccaacggcatcgacatgaacgcggtgctgaagggcttccctgagtgcctgcaggctgacatctgcctgcacctgaaccgctcactgctgcagcactgcaaacccttccgaggggccaccaagggctgccttcgggccctggccatgaagttcaagaccacacatgcaccgccaggggacacactggtgcatgctggggacctgctcaccgccctgtacttcatctcccggggctccatcgagatcctgcggggcgacgtcgtcgtggccatcctggggaagaatgacatctttggggagcctctgaacctgtatgcaaggcctggcaagtcgaacggggatgtgcgggccctcacctactgtgacctacacaagatccatcgggacgacctgctggaggtgctggacatgtaccctgagttctccgaccacttctggtccagcctggagatcaccttcaacctgcgagataccaacatgatcccgggctcccccggcagtacggagttagagggtggcttcagtcggcaacgcaagcgcaagttgtccttccgcaggcgcacggacaaggacacggagcagccaggggaggtgtcggccttggggccgggccgggcgggggcagggccgagtagccggggccggccgggggggccgtggggggagagcccgtccagtggcccctccagccctgagagcagtgaggatgagggcccaggccgcagctccagccccctccgcctggtgcccttctccagccccaggccccccggagagccgccgggtggggagcccctgatggaggactgcgagaagagcagcgacacttgcaaccccctgtcaggcgccttctcaggagtgtccaacattttcagcttctggggggacagtcggggccgccagtaccaggagctccctcgatgccccgcccccacccccagcctcctcaacatccccctctccagcccgggtcggcggccccggggcgacgtggagagcaggctggatgccctccggcgccagctcaacaggctggagacccggctgagtgcagacatggccactgtcctgcagctgctacagaggcagatgacgctggtcccgcccgcctacagtgctgtgaccaccccggggcctggccccacttccacatccccgctgttgcccgtcagccccctccccaccctcaccttggactcgctttctcaggtttcccagttcatggcgtgtgaggagctgcccccgggggccccagagcttccccaagaaggccccacacgacgcctctccctaccgggccagctgggggccctcacctcccagcccctgcacagacacggctcggacccgggcagttagtggggctgcccagtgtggacacgtggctcacccagggatcaaggcgctgctgggccgctccccttggaggccctgctcaggaggccctgaccgtggaaggggagaggaactcgaaagcacagctcctcccccagcccttgggaccatcttctcctgcagtcccctgggccccagtgagaggggcaggggcagggccggcagtaggtggggcctgtggtccccccactgccctgagggcattagctggtctaactgcccggaggcacccggccctgggccttaggcacctcaaggacttttctgctatttactgctcttattgttaaggataataattaaggatcatatgaataattaatgaagatgctgatgactatgaataataaataattatcctgaggaga

SEQ ID NO: 782 - DNA, 3884 bp, Homo sapiens
  source 1..3884: mol_type = genomic DNA
  misc_feature 1..3884: note = cDNA of KCNH2 gene SNP c.3138G>T (p.Gln1046His)
atgccggtgcggaggggccacgtcgcgccgcagaacaccttcctggacaccatcatccgcaagtttgagggccagagccgtaagttcatcatcgccaacgctcgggtggagaactgcgccgtcatctactgcaacgacggcttctgcgagctgtgcggctactcgcgggccgaggtgatgcagcgaccctgcacctgcgacttcctgcacgggccgcgcacgcagcgccgcgctgccgcgcagatcgcgcaggcactgctgggcgccgaggagcgcaaagtggaaatcgccttctaccggaaagatgggagctgcttcctatgtctggtggatgtggtgcccgtgaagaacgaggatggggctgtcatcatgttcatcctcaatttcgaggtggtgatggagaaggacatggtggggtccccggctcatgacaccaaccaccggggcccccccaccagctggctggccccaggccgcgccaagaccttccgcctgaagctgcccgcgctgctggcgctgacggcccgggagtcgtcggtgcggtcgggcggcgcgggcggcgcgggcgccccgggggccgtggtggtggacgtggacctgacgcccgcggcacccagcagcgagtcgctggccctggacgaagtgacagccatggacaaccacgtggcagggctcgggcccgcggaggagcggcgtgcgctggtgggtcccggctctccgccccgcagcgcgcccggccagctcccatcgccccgggcgcacagcctcaaccccgacgcctcgggctccagctgcagcctggcccggacgcgctcccgagaaagctgcgccagcgtgcgccgcgcctcgtcggccgacgacatcgaggccatgcgcgccggggtgctgcccccgccaccgcgccacgccagcaccggggccatgcacccactgcgcagcggcttgctcaactccacctcggactccgacctcgtgcgctaccgcaccattagcaagattccccaaatcaccctcaactttgtggacctcaagggcgaccccttcttggcttcgcccaccagtgaccgtgagatcatagcacctaagataaaggagcgaacccacaatgtcactgagaaggtcacccaggtcctgtccctgggcgccgacgtgctgcctgagtacaagctgcaggcaccgcgcatccaccgctggaccatcctgcattacagccccttcaaggccgtgtgggactggctcatcctgctgctggtcatctacacggctgtcttcacaccctactcggctgccttcctgctgaaggagacggaagaaggcccgcctgctaccgagtgtggctacgcctgccagccgctggctgtggtggacctcatcgtggacatcatgttcattgtggacatcctcatcaacttccgcaccacctacgtcaatgccaacgaggaggtggtcagccaccccggccgcatcgccgtccactacttcaagggctggttcctcatcgacatggtggccgccatccccttcgacctgctcatcttcggctctggctctgaggagctgatcgggctgctgaagactgcgcggctgctgcggctggtgcgcgtggcgcggaagctggatcgctactcagagtacggcgcggccgtgctgttcttgctcatgtgcacctttgcgctcatcgcgcactggctagcctgcatctggtacgccatcggcaacatggagcagccacacatggactcacgcatcggctggctgcacaacctgggcgaccagataggcaaaccctacaacagcagcggcctgggcggcccctccatcaaggacaagtatgtgacggcgctctacttcaccttcagcagcctcaccagtgtgggcttcggcaacgtctctcccaacaccaactcagagaagatcttctccatctgcgtcatgctcattggctccctcatgtatgctagcatcttcggcaacgtgtcggccatcatccagcggctgtactcgggcacagcccgctaccacacacagatgctgcgggtgcgggagttcatccgcttccaccagatccccaatcccctgcgccagcgcctcgaggagtacttccagcacgcctggtcctacaccaacggcatcgacatgaacgcggtgctgaagggcttccctgagtgcctgcaggctgacatctgcctgcacctgaaccgctcactgctgcagcactgcaaacccttccgaggggccaccaagggctgccttcgggccctggccatgaagttcaagaccacacatgcaccgccaggggacacactggtgcatgctggggacctgctcaccgccctgtacttcatctcccggggctccatcgagatcctgcggggcgacgtcgtcgtggccatcctggggaagaatgacatctttggggagcctctgaacctgtatgcaaggcctggcaagtcgaacggggatgtgcgggccctcacctactgtgacctacacaagatccatcgggacgacctgctggaggtgctggacatgtaccctgagttctccgaccacttctggtccagcctggagatcaccttcaacctgcgagataccaacatgatcccgggctcccccggcagtacggagttagagggtggcttcagtcggcaacgcaagcgcaagttgtccttccgcaggcgcacggacaaggacacggagcagccaggggaggtgtcggccttggggccgggccgggcgggggcagggccgagtagccggggccggccgggggggccgtggggggagagcccgtccagtggcccctccagccctgagagcagtgaggatgagggcccaggccgcagctccagccccctccgcctggtgcccttctccagccccaggccccccggagagccgccgggtggggagcccctgatggaggactgcgagaagagcagcgacacttgcaaccccctgtcaggcgccttctcaggagtgtccaacattttcagcttctggggggacagtcggggccgccagtaccaggagctccctcgatgccccgcccccacccccagcctcctcaacatccccctctccagcccgggtcggcggccccggggcgacgtggagagcaggctggatgccctccatcgccagctcaacaggctggagacccggctgagtgcagacatggccactgtcctgcagctgctacagaggcagatgacgctggtcccgcccgcctacagtgctgtgaccaccccggggcctggccccacttccacatccccgctgttgcccgtcagccccctccccaccctcaccttggactcgctttctcaggtttcccagttcatggcgtgtgaggagctgcccccgggggccccagagcttccccaagaaggccccacacgacgcctctccctaccgggccagctgggggccctcacctcccagcccctgcacagacacggctcggacccgggcagttagtggggctgcccagtgtggacacgtggctcacccagggatcaaggcgctgctgggccgctccccttggaggccctgctcaggaggccctgaccgtggaaggggagaggaactcgaaagcacagctcctcccccagcccttgggaccatcttctcctgcagtcccctgggccccagtgagaggggcaggggcagggccggcagtaggtggggcctgtggtccccccactgccctgagggcattagctggtctaactgcccggaggcacccggccctgggccttaggcacctcaaggacttttctgctatttactgctcttattgttaaggataataattaaggatcatatgaataattaatgaagatgctgatgactatgaataataaataattatcctgaggaga

SEQ ID NO: 783 - DNA, 3884 bp, Homo sapiens
  source 1..3884: mol_type = genomic DNA
  misc_feature 1..3884: note = cDNA of KCNH2 gene SNP c.3139C>T (p.Arg1047Cys)
atgccggtgcggaggggccacgtcgcgccgcagaacaccttcctggacaccatcatccgcaagtttgagggccagagccgtaagttcatcatcgccaacgctcgggtggagaactgcgccgtcatctactgcaacgacggcttctgcgagctgtgcggctactcgcgggccgaggtgatgcagcgaccctgcacctgcgacttcctgcacgggccgcgcacgcagcgccgcgctgccgcgcagatcgcgcaggcactgctgggcgccgaggagcgcaaagtggaaatcgccttctaccggaaagatgggagctgcttcctatgtctggtggatgtggtgcccgtgaagaacgaggatggggctgtcatcatgttcatcctcaatttcgaggtggtgatggagaaggacatggtggggtccccggctcatgacaccaaccaccggggcccccccaccagctggctggccccaggccgcgccaagaccttccgcctgaagctgcccgcgctgctggcgctgacggcccgggagtcgtcggtgcggtcgggcggcgcgggcggcgcgggcgccccgggggccgtggtggtggacgtggacctgacgcccgcggcacccagcagcgagtcgctggccctggacgaagtgacagccatggacaaccacgtggcagggctcgggcccgcggaggagcggcgtgcgctggtgggtcccggctctccgccccgcagcgcgcccggccagctcccatcgccccgggcgcacagcctcaaccccgacgcctcgggctccagctgcagcctggcccggacgcgctcccgagaaagctgcgccagcgtgcgccgcgcctcgtcggccgacgacatcgaggccatgcgcgccggggtgctgcccccgccaccgcgccacgccagcaccggggccatgcacccactgcgcagcggcttgctcaactccacctcggactccgacctcgtgcgctaccgcaccattagcaagattccccaaatcaccctcaactttgtggacctcaagggcgaccccttcttggcttcgcccaccagtgaccgtgagatcatagcacctaagataaaggagcgaacccacaatgtcactgagaaggtcacccaggtcctgtccctgggcgccgacgtgctgcctgagtacaagctgcaggcaccgcgcatccaccgctggaccatcctgcattacagccccttcaaggccgtgtgggactggctcatcctgctgctggtcatctacacggctgtcttcacaccctactcggctgccttcctgctgaaggagacggaagaaggcccgcctgctaccgagtgtggctacgcctgccagccgctggctgtggtggacctcatcgtggacatcatgttcattgtggacatcctcatcaacttccgcaccacctacgtcaatgccaacgaggaggtggtcagccaccccggccgcatcgccgtccactacttcaagggctggttcctcatcgacatggtggccgccatccccttcgacctgctcatcttcggctctggctctgaggagctgatcgggctgctgaagactgcgcggctgctgcggctggtgcgcgtggcgcggaagctggatcgctactcagagtacggcgcggccgtgctgttcttgctcatgtgcacctttgcgctcatcgcgcactggctagcctgcatctggtacgccatcggcaacatggagcagccacacatggactcacgcatcggctggctgcacaacctgggcgaccagataggcaaaccctacaacagcagcggcctgggcggcccctccatcaaggacaagtatgtgacggcgctctacttcaccttcagcagcctcaccagtgtgggcttcggcaacgtctctcccaacaccaactcagagaagatcttctccatctgcgtcatgctcattggctccctcatgtatgctagcatcttcggcaacgtgtcggccatcatccagcggctgtactcgggcacagcccgctaccacacacagatgctgcgggtgcgggagttcatccgcttccaccagatccccaatcccctgcgccagcgcctcgaggagtacttccagcacgcctggtcctacaccaacggcatcgacatgaacgcggtgctgaagggcttccctgagtgcctgcaggctgacatctgcctgcacctgaaccgctcactgctgcagcactgcaaacccttccgaggggccaccaagggctgccttcgggccctggccatgaagttcaagaccacacatgcaccgccaggggacacactggtgcatgctggggacctgctcaccgccctgtacttcatctcccggggctccatcgagatcctgcggggcgacgtcgtcgtggccatcctggggaagaatgacatctttggggagcctctgaacctgtatgcaaggcctggcaagtcgaacggggatgtgcgggccctcacctactgtgacctacacaagatccatcgggacgacctgctggaggtgctggacatgtaccctgagttctccgaccacttctggtccagcctggagatcaccttcaacctgcgagataccaacatgatcccgggctcccccggcagtacggagttagagggtggcttcagtcggcaacgcaagcgcaagttgtccttccgcaggcgcacggacaaggacacggagcagccaggggaggtgtcggccttggggccgggccgggcgggggcagggccgagtagccggggccggccgggggggccgtggggggagagcccgtccagtggcccctccagccctgagagcagtgaggatgagggcccaggccgcagctccagccccctccgcctggtgcccttctccagccccaggccccccggagagccgccgggtggggagcccctgatggaggactgcgagaagagcagcgacacttgcaaccccctgtcaggcgccttctcaggagtgtccaacattttcagcttctggggggacagtcggggccgccagtaccaggagctccctcgatgccccgcccccacccccagcctcctcaacatccccctctccagcccgggtcggcggccccggggcgacgtggagagcaggctggatgccctccagtgccagctcaacaggctggagacccggctgagtgcagacatggccactgtcctgcagctgctacagaggcagatgacgctggtcccgcccgcctacagtgctgtgaccaccccggggcctggccccacttccacatccccgctgttgcccgtcagccccctccccaccctcaccttggactcgctttctcaggtttcccagttcatggcgtgtgaggagctgcccccgggggccccagagcttccccaagaaggccccacacgacgcctctccctaccgggccagctgggggccctcacctcccagcccctgcacagacacggctcggacccgggcagttagtggggctgcccagtgtggacacgtggctcacccagggatcaaggcgctgctgggccgctccccttggaggccctgctcaggaggccctgaccgtggaaggggagaggaactcgaaagcacagctcctcccccagcccttgggaccatcttctcctgcagtcccctgggccccagtgagaggggcaggggcagggccggcagtaggtggggcctgtggtccccccactgccctgagggcattagctggtctaactgcccggaggcacccggccctgggccttaggcacctcaaggacttttctgctatttactgctcttattgttaaggataataattaaggatcatatgaataattaatgaagatgctgatgactatgaataataaataattatcctgaggaga

SEQ ID NO: 784 - DNA, 3884 bp, Homo sapiens
  source 1..3884: mol_type = genomic DNA
  misc_feature 1..3884: note = cDNA of KCNH2 gene SNP c.3140G>A (p.Arg1047His)
atgccggtgcggaggggccacgtcgcgccgcagaacaccttcctggacaccatcatccgcaagtttgagggccagagccgtaagttcatcatcgccaacgctcgggtggagaactgcgccgtcatctactgcaacgacggcttctgcgagctgtgcggctactcgcgggccgaggtgatgcagcgaccctgcacctgcgacttcctgcacgggccgcgcacgcagcgccgcgctgccgcgcagatcgcgcaggcactgctgggcgccgaggagcgcaaagtggaaatcgccttctaccggaaagatgggagctgcttcctatgtctggtggatgtggtgcccgtgaagaacgaggatggggctgtcatcatgttcatcctcaatttcgaggtggtgatggagaaggacatggtggggtccccggctcatgacaccaaccaccggggcccccccaccagctggctggccccaggccgcgccaagaccttccgcctgaagctgcccgcgctgctggcgctgacggcccgggagtcgtcggtgcggtcgggcggcgcgggcggcgcgggcgccccgggggccgtggtggtggacgtggacctgacgcccgcggcacccagcagcgagtcgctggccctggacgaagtgacagccatggacaaccacgtggcagggctcgggcccgcggaggagcggcgtgcgctggtgggtcccggctctccgccccgcagcgcgcccggccagctcccatcgccccgggcgcacagcctcaaccccgacgcctcgggctccagctgcagcctggcccggacgcgctcccgagaaagctgcgccagcgtgcgccgcgcctcgtcggccgacgacatcgaggccatgcgcgccggggtgctgcccccgccaccgcgccacgccagcaccggggccatgcacccactgcgcagcggcttgctcaactccacctcggactccgacctcgtgcgctaccgcaccattagcaagattccccaaatcaccctcaactttgtggacctcaagggcgaccccttcttggcttcgcccaccagtgaccgtgagatcatagcacctaagataaaggagcgaacccacaatgtcactgagaaggtcacccaggtcctgtccctgggcgccgacgtgctgcctgagtacaagctgcaggcaccgcgcatccaccgctggaccatcctgcattacagccccttcaaggccgtgtgggactggctcatcctgctgctggtcatctacacggctgtcttcacaccctactcggctgccttcctgctgaaggagacggaagaaggcccgcctgctaccgagtgtggctacgcctgccagccgctggctgtggtggacctcatcgtggacatcatgttcattgtggacatcctcatcaacttccgcaccacctacgtcaatgccaacgaggaggtggtcagccaccccggccgcatcgccgtccactacttcaagggctggttcctcatcgacatggtggccgccatccccttcgacctgctcatcttcggctctggctctgaggagctgatcgggctgctgaagactgcgcggctgctgcggctggtgcgcgtggcgcggaagctggatcgctactcagagtacggcgcggccgtgctgttcttgctcatgtgcacctttgcgctcatcgcgcactggctagcctgcatctggtacgccatcggcaacatggagcagccacacatggactcacgcatcggctggctgcacaacctgggcgaccagataggcaaaccctacaacagcagcggcctgggcggcccctccatcaaggacaagtatgtgacggcgctctacttcaccttcagcagcctcaccagtgtgggcttcggcaacgtctctcccaacaccaactcagagaagatcttctccatctgcgtcatgctcattggctccctcatgtatgctagcatcttcggcaacgtgtcggccatcatccagcggctgtactcgggcacagcccgctaccacacacagatgctgcgggtgcgggagttcatccgcttccaccagatccccaatcccctgcgccagcgcctcgaggagtacttccagcacgcctggtcctacaccaacggcatcgacatgaacgcggtgctgaagggcttccctgagtgcctgcaggctgacatctgcctgcacctgaaccgctcactgctgcagcactgcaaacccttccgaggggccaccaagggctgccttcgggccctggccatgaagttcaagaccacacatgcaccgccaggggacacactggtgcatgctggggacctgctcaccgccctgtacttcatctcccggggctccatcgagatcctgcggggcgacgtcgtcgtggccatcctggggaagaatgacatctttggggagcctctgaacctgtatgcaaggcctggcaagtcgaacggggatgtgcgggccctcacctactgtgacctacacaagatccatcgggacgacctgctggaggtgctggacatgtaccctgagttctccgaccacttctggtccagcctggagatcaccttcaacctgcgagataccaacatgatcccgggctcccccggcagtacggagttagagggtggcttcagtcggcaacgcaagcgcaagttgtccttccgcaggcgcacggacaaggacacggagcagccaggggaggtgtcggccttggggccgggccgggcgggggcagggccgagtagccggggccggccgggggggccgtggggggagagcccgtccagtggcccctccagccctgagagcagtgaggatgagggcccaggccgcagctccagccccctccgcctggtgcccttctccagccccaggccccccggagagccgccgggtggggagcccctgatggaggactgcgagaagagcagcgacacttgcaaccccctgtcaggcgccttctcaggagtgtccaacattttcagcttctggggggacagtcggggccgccagtaccaggagctccctcgatgccccgcccccacccccagcctcctcaacatccccctctccagcccgggtcggcggccccggggcgacgtggagagcaggctggatgccctccagcaccagctcaacaggctggagacccggctgagtgcagacatggccactgtcctgcagctgctacagaggcagatgacgctggtcccgcccgcctacagtgctgtgaccaccccggggcctggccccacttccacatccccgctgttgcccgtcagccccctccccaccctcaccttggactcgctttctcaggtttcccagttcatggcgtgtgaggagctgcccccgggggccccagagcttccccaagaaggccccacacgacgcctctccctaccgggccagctgggggccctcacctcccagcccctgcacagacacggctcggacccgggcagttagtggggctgcccagtgtggacacgtggctcacccagggatcaaggcgctgctgggccgctccccttggaggccctgctcaggaggccctgaccgtggaaggggagaggaactcgaaagcacagctcctcccccagcccttgggaccatcttctcctgcagtcccctgggccccagtgagaggggcaggggcagggccggcagtaggtggggcctgtggtccccccactgccctgagggcattagctggtctaactgcccggaggcacccggccctgggccttaggcacctcaaggacttttctgctatttactgctcttattgttaaggataataattaaggatcatatgaataattaatgaagatgctgatgactatgaataataaataattatcctgaggaga

SEQ ID NO: 785 - DNA, 3884 bp, Homo sapiens
  source 1..3884: mol_type = genomic DNA
  misc_feature 1..3884: note = cDNA of KCNH2 gene SNP c.3140G>T (p.Arg1047Leu)
atgccggtgcggaggggccacgtcgcgccgcagaacaccttcctggacaccatcatccgcaagtttgagggccagagccgtaagttcatcatcgccaacgctcgggtggagaactgcgccgtcatctactgcaacgacggcttctgcgagctgtgcggctactcgcgggccgaggtgatgcagcgaccctgcacctgcgacttcctgcacgggccgcgcacgcagcgccgcgctgccgcgcagatcgcgcaggcactgctgggcgccgaggagcgcaaagtggaaatcgccttctaccggaaagatgggagctgcttcctatgtctggtggatgtggtgcccgtgaagaacgaggatggggctgtcatcatgttcatcctcaatttcgaggtggtgatggagaaggacatggtggggtccccggctcatgacaccaaccaccggggcccccccaccagctggctggccccaggccgcgccaagaccttccgcctgaagctgcccgcgctgctggcgctgacggcccgggagtcgtcggtgcggtcgggcggcgcgggcggcgcgggcgccccgggggccgtggtggtggacgtggacctgacgcccgcggcacccagcagcgagtcgctggccctggacgaagtgacagccatggacaaccacgtggcagggctcgggcccgcggaggagcggcgtgcgctggtgggtcccggctctccgccccgcagcgcgcccggccagctcccatcgccccgggcgcacagcctcaaccccgacgcctcgggctccagctgcagcctggcccggacgcgctcccgagaaagctgcgccagcgtgcgccgcgcctcgtcggccgacgacatcgaggccatgcgcgccggggtgctgcccccgccaccgcgccacgccagcaccggggccatgcacccactgcgcagcggcttgctcaactccacctcggactccgacctcgtgcgctaccgcaccattagcaagattccccaaatcaccctcaactttgtggacctcaagggcgaccccttcttggcttcgcccaccagtgaccgtgagatcatagcacctaagataaaggagcgaacccacaatgtcactgagaaggtcacccaggtcctgtccctgggcgccgacgtgctgcctgagtacaagctgcaggcaccgcgcatccaccgctggaccatcctgcattacagccccttcaaggccgtgtgggactggctcatcctgctgctggtcatctacacggctgtcttcacaccctactcggctgccttcctgctgaaggagacggaagaaggcccgcctgctaccgagtgtggctacgcctgccagccgctggctgtggtggacctcatcgtggacatcatgttcattgtggacatcctcatcaacttccgcaccacctacgtcaatgccaacgaggaggtggtcagccaccccggccgcatcgccgtccactacttcaagggctggttcctcatcgacatggtggccgccatccccttcgacctgctcatcttcggctctggctctgaggagctgatcgggctgctgaagactgcgcggctgctgcggctggtgcgcgtggcgcggaagctggatcgctactcagagtacggcgcggccgtgctgttcttgctcatgtgcacctttgcgctcatcgcgcactggctagcctgcatctggtacgccatcggcaacatggagcagccacacatggactcacgcatcggctggctgcacaacctgggcgaccagataggcaaaccctacaacagcagcggcctgggcggcccctccatcaaggacaagtatgtgacggcgctctacttcaccttcagcagcctcaccagtgtgggcttcggcaacgtctctcccaacaccaactcagagaagatcttctccatctgcgtcatgctcattggctccctcatgtatgctagcatcttcggcaacgtgtcggccatcatccagcggctgtactcgggcacagcccgctaccacacacagatgctgcgggtgcgggagttcatccgcttccaccagatccccaatcccctgcgccagcgcctcgaggagtacttccagcacgcctggtcctacaccaacggcatcgacatgaacgcggtgctgaagggcttccctgagtgcctgcaggctgacatctgcctgcacctgaaccgctcactgctgcagcactgcaaacccttccgaggggccaccaagggctgccttcgggccctggccatgaagttcaagaccacacatgcaccgccaggggacacactggtgcatgctggggacctgctcaccgccctgtacttcatctcccggggctccatcgagatcctgcggggcgacgtcgtcgtggccatcctggggaagaatgacatctttggggagcctctgaacctgtatgcaaggcctggcaagtcgaacggggatgtgcgggccctcacctactgtgacctacacaagatccatcgggacgacctgctggaggtgctggacatgtaccctgagttctccgaccacttctggtccagcctggagatcaccttcaacctgcgagataccaacatgatcccgggctcccccggcagtacggagttagagggtggcttcagtcggcaacgcaagcgcaagttgtccttccgcaggcgcacggacaaggacacggagcagccaggggaggtgtcggccttggggccgggccgggcgggggcagggccgagtagccggggccggccgggggggccgtggggggagagcccgtccagtggcccctccagccctgagagcagtgaggatgagggcccaggccgcagctccagccccctccgcctggtgcccttctccagccccaggccccccggagagccgccgggtggggagcccctgatggaggactgcgagaagagcagcgacacttgcaaccccctgtcaggcgccttctcaggagtgtccaacattttcagcttctggggggacagtcggggccgccagtaccaggagctccctcgatgccccgcccccacccccagcctcctcaacatccccctctccagcccgggtcggcggccccggggcgacgtggagagcaggctggatgccctccagctccagctcaacaggctggagacccggctgagtgcagacatggccactgtcctgcagctgctacagaggcagatgacgctggtcccgcccgcctacagtgctgtgaccaccccggggcctggccccacttccacatccccgctgttgcccgtcagccccctccccaccctcaccttggactcgctttctcaggtttcccagttcatggcgtgtgaggagctgcccccgggggccccagagcttccccaagaaggccccacacgacgcctctccctaccgggccagctgggggccctcacctcccagcccctgcacagacacggctcggacccgggcagttagtggggctgcccagtgtggacacgtggctcacccagggatcaaggcgctgctgggccgctccccttggaggccctgctcaggaggccctgaccgtggaaggggagaggaactcgaaagcacagctcctcccccagcccttgggaccatcttctcctgcagtcccctgggccccagtgagaggggcaggggcagggccggcagtaggtggggcctgtggtccccccactgccctgagggcattagctggtctaactgcccggaggcacccggccctgggccttaggcacctcaaggacttttctgctatttactgctcttattgttaaggataataattaaggatcatatgaataattaatgaagatgctgatgactatgaataataaataattatcctgaggaga

SEQ ID NO: 786 - DNA, 3884 bp, Homo sapiens
  source 1..3884: mol_type = genomic DNA
  misc_feature 1..3884: note = cDNA of KCNH2 gene SNP c.3146T>C (p.Leu1049Pro)
atgccggtgcggaggggccacgtcgcgccgcagaacaccttcctggacaccatcatccgcaagtttgagggccagagccgtaagttcatcatcgccaacgctcgggtggagaactgcgccgtcatctactgcaacgacggcttctgcgagctgtgcggctactcgcgggccgaggtgatgcagcgaccctgcacctgcgacttcctgcacgggccgcgcacgcagcgccgcgctgccgcgcagatcgcgcaggcactgctgggcgccgaggagcgcaaagtggaaatcgccttctaccggaaagatgggagctgcttcctatgtctggtggatgtggtgcccgtgaagaacgaggatggggctgtcatcatgttcatcctcaatttcgaggtggtgatggagaaggacatggtggggtccccggctcatgacaccaaccaccggggcccccccaccagctggctggccccaggccgcgccaagaccttccgcctgaagctgcccgcgctgctggcgctgacggcccgggagtcgtcggtgcggtcgggcggcgcgggcggcgcgggcgccccgggggccgtggtggtggacgtggacctgacgcccgcggcacccagcagcgagtcgctggccctggacgaagtgacagccatggacaaccacgtggcagggctcgggcccgcggaggagcggcgtgcgctggtgggtcccggctctccgccccgcagcgcgcccggccagctcccatcgccccgggcgcacagcctcaaccccgacgcctcgggctccagctgcagcctggcccggacgcgctcccgagaaagctgcgccagcgtgcgccgcgcctcgtcggccgacgacatcgaggccatgcgcgccggggtgctgcccccgccaccgcgccacgccagcaccggggccatgcacccactgcgcagcggcttgctcaactccacctcggactccgacctcgtgcgctaccgcaccattagcaagattccccaaatcaccctcaactttgtggacctcaagggcgaccccttcttggcttcgcccaccagtgaccgtgagatcatagcacctaagataaaggagcgaacccacaatgtcactgagaaggtcacccaggtcctgtccctgggcgccgacgtgctgcctgagtacaagctgcaggcaccgcgcatccaccgctggaccatcctgcattacagccccttcaaggccgtgtgggactggctcatcctgctgctggtcatctacacggctgtcttcacaccctactcggctgccttcctgctgaaggagacggaagaaggcccgcctgctaccgagtgtggctacgcctgccagccgctggctgtggtggacctcatcgtggacatcatgttcattgtggacatcctcatcaacttccgcaccacctacgtcaatgccaacgaggaggtggtcagccaccccggccgcatcgccgtccactacttcaagggctggttcctcatcgacatggtggccgccatccccttcgacctgctcatcttcggctctggctctgaggagctgatcgggctgctgaagactgcgcggctgctgcggctggtgcgcgtggcgcggaagctggatcgctactcagagtacggcgcggccgtgctgttcttgctcatgtgcacctttgcgctcatcgcgcactggctagcctgcatctggtacgccatcggcaacatggagcagccacacatggactcacgcatcggctggctgcacaacctgggcgaccagataggcaaaccctacaacagcagcggcctgggcggcccctccatcaaggacaagtatgtgacggcgctctacttcaccttcagcagcctcaccagtgtgggcttcggcaacgtctctcccaacaccaactcagagaagatcttctccatctgcgtcatgctcattggctccctcatgtatgctagcatcttcggcaacgtgtcggccatcatccagcggctgtactcgggcacagcccgctaccacacacagatgctgcgggtgcgggagttcatccgcttccaccagatccccaatcccctgcgccagcgcctcgaggagtacttccagcacgcctggtcctacaccaacggcatcgacatgaacgcggtgctgaagggcttccctgagtgcctgcaggctgacatctgcctgcacctgaaccgctcactgctgcagcactgcaaacccttccgaggggccaccaagggctgccttcgggccctggccatgaagttcaagaccacacatgcaccgccaggggacacactggtgcatgctggggacctgctcaccgccctgtacttcatctcccggggctccatcgagatcctgcggggcgacgtcgtcgtggccatcctggggaagaatgacatctttggggagcctctgaacctgtatgcaaggcctggcaagtcgaacggggatgtgcgggccctcacctactgtgacctacacaagatccatcgggacgacctgctggaggtgctggacatgtaccctgagttctccgaccacttctggtccagcctggagatcaccttcaacctgcgagataccaacatgatcccgggctcccccggcagtacggagttagagggtggcttcagtcggcaacgcaagcgcaagttgtccttccgcaggcgcacggacaaggacacggagcagccaggggaggtgtcggccttggggccgggccgggcgggggcagggccgagtagccggggccggccgggggggccgtggggggagagcccgtccagtggcccctccagccctgagagcagtgaggatgagggcccaggccgcagctccagccccctccgcctggtgcccttctccagccccaggccccccggagagccgccgggtggggagcccctgatggaggactgcgagaagagcagcgacacttgcaaccccctgtcaggcgccttctcaggagtgtccaacattttcagcttctggggggacagtcggggccgccagtaccaggagctccctcgatgccccgcccccacccccagcctcctcaacatccccctctccagcccgggtcggcggccccggggcgacgtggagagcaggctggatgccctccagcgccagcccaacaggctggagacccggctgagtgcagacatggccactgtcctgcagctgctacagaggcagatgacgctggtcccgcccgcctacagtgctgtgaccaccccggggcctggccccacttccacatccccgctgttgcccgtcagccccctccccaccctcaccttggactcgctttctcaggtttcccagttcatggcgtgtgaggagctgcccccgggggccccagagcttccccaagaaggccccacacgacgcctctccctaccgggccagctgggggccctcacctcccagcccctgcacagacacggctcggacccgggcagttagtggggctgcccagtgtggacacgtggctcacccagggatcaaggcgctgctgggccgctccccttggaggccctgctcaggaggccctgaccgtggaaggggagaggaactcgaaagcacagctcctcccccagcccttgggaccatcttctcctgcagtcccctgggccccagtgagaggggcaggggcagggccggcagtaggtggggcctgtggtccccccactgccctgagggcattagctggtctaactgcccggaggcacccggccctgggccttaggcacctcaaggacttttctgctatttactgctcttattgttaaggataataattaaggatcatatgaataattaatgaagatgctgatgactatgaataataaataattatcctgaggaga

SEQ ID NO: 787 - DNA, 3884 bp, Homo sapiens
  source 1..3884: mol_type = genomic DNA
  misc_feature 1..3884: note = cDNA of KCNH2 gene SNP c.3153G>T (p.Arg1051Ser)
atgccggtgcggaggggccacgtcgcgccgcagaacaccttcctggacaccatcatccgcaagtttgagggccagagccgtaagttcatcatcgccaacgctcgggtggagaactgcgccgtcatctactgcaacgacggcttctgcgagctgtgcggctactcgcgggccgaggtgatgcagcgaccctgcacctgcgacttcctgcacgggccgcgcacgcagcgccgcgctgccgcgcagatcgcgcaggcactgctgggcgccgaggagcgcaaagtggaaatcgccttctaccggaaagatgggagctgcttcctatgtctggtggatgtggtgcccgtgaagaacgaggatggggctgtcatcatgttcatcctcaatttcgaggtggtgatggagaaggacatggtggggtccccggctcatgacaccaaccaccggggcccccccaccagctggctggccccaggccgcgccaagaccttccgcctgaagctgcccgcgctgctggcgctgacggcccgggagtcgtcggtgcggtcgggcggcgcgggcggcgcgggcgccccgggggccgtggtggtggacgtggacctgacgcccgcggcacccagcagcgagtcgctggccctggacgaagtgacagccatggacaaccacgtggcagggctcgggcccgcggaggagcggcgtgcgctggtgggtcccggctctccgccccgcagcgcgcccggccagctcccatcgccccgggcgcacagcctcaaccccgacgcctcgggctccagctgcagcctggcccggacgcgctcccgagaaagctgcgccagcgtgcgccgcgcctcgtcggccgacgacatcgaggccatgcgcgccggggtgctgcccccgccaccgcgccacgccagcaccggggccatgcacccactgcgcagcggcttgctcaactccacctcggactccgacctcgtgcgctaccgcaccattagcaagattccccaaatcaccctcaactttgtggacctcaagggcgaccccttcttggcttcgcccaccagtgaccgtgagatcatagcacctaagataaaggagcgaacccacaatgtcactgagaaggtcacccaggtcctgtccctgggcgccgacgtgctgcctgagtacaagctgcaggcaccgcgcatccaccgctggaccatcctgcattacagccccttcaaggccgtgtgggactggctcatcctgctgctggtcatctacacggctgtcttcacaccctactcggctgccttcctgctgaaggagacggaagaaggcccgcctgctaccgagtgtggctacgcctgccagccgctggctgtggtggacctcatcgtggacatcatgttcattgtggacatcctcatcaacttccgcaccacctacgtcaatgccaacgaggaggtggtcagccaccccggccgcatcgccgtccactacttcaagggctggttcctcatcgacatggtggccgccatccccttcgacctgctcatcttcggctctggctctgaggagctgatcgggctgctgaagactgcgcggctgctgcggctggtgcgcgtggcgcggaagctggatcgctactcagagtacggcgcggccgtgctgttcttgctcatgtgcacctttgcgctcatcgcgcactggctagcctgcatctggtacgccatcggcaacatggagcagccacacatggactcacgcatcggctggctgcacaacctgggcgaccagataggcaaaccctacaacagcagcggcctgggcggcccctccatcaaggacaagtatgtgacggcgctctacttcaccttcagcagcctcaccagtgtgggcttcggcaacgtctctcccaacaccaactcagagaagatcttctccatctgcgtcatgctcattggctccctcatgtatgctagcatcttcggcaacgtgtcggccatcatccagcggctgtactcgggcacagcccgctaccacacacagatgctgcgggtgcgggagttcatccgcttccaccagatccccaatcccctgcgccagcgcctcgaggagtacttccagcacgcctggtcctacaccaacggcatcgacatgaacgcggtgctgaagggcttccctgagtgcctgcaggctgacatctgcctgcacctgaaccgctcactgctgcagcactgcaaacccttccgaggggccaccaagggctgccttcgggccctggccatgaagttcaagaccacacatgcaccgccaggggacacactggtgcatgctggggacctgctcaccgccctgtacttcatctcccggggctccatcgagatcctgcggggcgacgtcgtcgtggccatcctggggaagaatgacatctttggggagcctctgaacctgtatgcaaggcctggcaagtcgaacggggatgtgcgggccctcacctactgtgacctacacaagatccatcgggacgacctgctggaggtgctggacatgtaccctgagttctccgaccacttctggtccagcctggagatcaccttcaacctgcgagataccaacatgatcccgggctcccccggcagtacggagttagagggtggcttcagtcggcaacgcaagcgcaagttgtccttccgcaggcgcacggacaaggacacggagcagccaggggaggtgtcggccttggggccgggccgggcgggggcagggccgagtagccggggccggccgggggggccgtggggggagagcccgtccagtggcccctccagccctgagagcagtgaggatgagggcccaggccgcagctccagccccctccgcctggtgcccttctccagccccaggccccccggagagccgccgggtggggagcccctgatggaggactgcgagaagagcagcgacacttgcaaccccctgtcaggcgccttctcaggagtgtccaacattttcagcttctggggggacagtcggggccgccagtaccaggagctccctcgatgccccgcccccacccccagcctcctcaacatccccctctccagcccgggtcggcggccccggggcgacgtggagagcaggctggatgccctccagcgccagctcaacagtctggagacccggctgagtgcagacatggccactgtcctgcagctgctacagaggcagatgacgctggtcccgcccgcctacagtgctgtgaccaccccggggcctggccccacttccacatccccgctgttgcccgtcagccccctccccaccctcaccttggactcgctttctcaggtttcccagttcatggcgtgtgaggagctgcccccgggggccccagagcttccccaagaaggccccacacgacgcctctccctaccgggccagctgggggccctcacctcccagcccctgcacagacacggctcggacccgggcagttagtggggctgcccagtgtggacacgtggctcacccagggatcaaggcgctgctgggccgctccccttggaggccctgctcaggaggccctgaccgtggaaggggagaggaactcgaaagcacagctcctcccccagcccttgggaccatcttctcctgcagtcccctgggccccagtgagaggggcaggggcagggccggcagtaggtggggcctgtggtccccccactgccctgagggcattagctggtctaactgcccggaggcacccggccctgggccttaggcacctcaaggacttttctgctatttactgctcttattgttaaggataataattaaggatcatatgaataattaatgaagatgctgatgactatgaataataaataattatcctgaggaga

SEQ ID NO: 788 - DNA, 3884 bp, Homo sapiens
  source 1..3884: mol_type = genomic DNA
  misc_feature 1..3884: note = cDNA of KCNH2 gene SNP c.3161C>T (p.Thr1054Ile)
atgccggtgcggaggggccacgtcgcgccgcagaacaccttcctggacaccatcatccgcaagtttgagggccagagccgtaagttcatcatcgccaacgctcgggtggagaactgcgccgtcatctactgcaacgacggcttctgcgagctgtgcggctactcgcgggccgaggtgatgcagcgaccctgcacctgcgacttcctgcacgggccgcgcacgcagcgccgcgctgccgcgcagatcgcgcaggcactgctgggcgccgaggagcgcaaagtggaaatcgccttctaccggaaagatgggagctgcttcctatgtctggtggatgtggtgcccgtgaagaacgaggatggggctgtcatcatgttcatcctcaatttcgaggtggtgatggagaaggacatggtggggtccccggctcatgacaccaaccaccggggcccccccaccagctggctggccccaggccgcgccaagaccttccgcctgaagctgcccgcgctgctggcgctgacggcccgggagtcgtcggtgcggtcgggcggcgcgggcggcgcgggcgccccgggggccgtggtggtggacgtggacctgacgcccgcggcacccagcagcgagtcgctggccctggacgaagtgacagccatggacaaccacgtggcagggctcgggcccgcggaggagcggcgtgcgctggtgggtcccggctctccgccccgcagcgcgcccggccagctcccatcgccccgggcgcacagcctcaaccccgacgcctcgggctccagctgcagcctggcccggacgcgctcccgagaaagctgcgccagcgtgcgccgcgcctcgtcggccgacgacatcgaggccatgcgcgccggggtgctgcccccgccaccgcgccacgccagcaccggggccatgcacccactgcgcagcggcttgctcaactccacctcggactccgacctcgtgcgctaccgcaccattagcaagattccccaaatcaccctcaactttgtggacctcaagggcgaccccttcttggcttcgcccaccagtgaccgtgagatcatagcacctaagataaaggagcgaacccacaatgtcactgagaaggtcacccaggtcctgtccctgggcgccgacgtgctgcctgagtacaagctgcaggcaccgcgcatccaccgctggaccatcctgcattacagccccttcaaggccgtgtgggactggctcatcctgctgctggtcatctacacggctgtcttcacaccctactcggctgccttcctgctgaaggagacggaagaaggcccgcctgctaccgagtgtggctacgcctgccagccgctggctgtggtggacctcatcgtggacatcatgttcattgtggacatcctcatcaacttccgcaccacctacgtcaatgccaacgaggaggtggtcagccaccccggccgcatcgccgtccactacttcaagggctggttcctcatcgacatggtggccgccatccccttcgacctgctcatcttcggctctggctctgaggagctgatcgggctgctgaagactgcgcggctgctgcggctggtgcgcgtggcgcggaagctggatcgctactcagagtacggcgcggccgtgctgttcttgctcatgtgcacctttgcgctcatcgcgcactggctagcctgcatctggtacgccatcggcaacatggagcagccacacatggactcacgcatcggctggctgcacaacctgggcgaccagataggcaaaccctacaacagcagcggcctgggcggcccctccatcaaggacaagtatgtgacggcgctctacttcaccttcagcagcctcaccagtgtgggcttcggcaacgtctctcccaacaccaactcagagaagatcttctccatctgcgtcatgctcattggctccctcatgtatgctagcatcttcggcaacgtgtcggccatcatccagcggctgtactcgggcacagcccgctaccacacacagatgctgcgggtgcgggagttcatccgcttccaccagatccccaatcccctgcgccagcgcctcgaggagtacttccagcacgcctggtcctacaccaacggcatcgacatgaacgcggtgctgaagggcttccctgagtgcctgcaggctgacatctgcctgcacctgaaccgctcactgctgcagcactgcaaacccttccgaggggccaccaagggctgccttcgggccctggccatgaagttcaagaccacacatgcaccgccaggggacacactggtgcatgctggggacctgctcaccgccctgtacttcatctcccggggctccatcgagatcctgcggggcgacgtcgtcgtggccatcctggggaagaatgacatctttggggagcctctgaacctgtatgcaaggcctggcaagtcgaacggggatgtgcgggccctcacctactgtgacctacacaagatccatcgggacgacctgctggaggtgctggacatgtaccctgagttctccgaccacttctggtccagcctggagatcaccttcaacctgcgagataccaacatgatcccgggctcccccggcagtacggagttagagggtggcttcagtcggcaacgcaagcgcaagttgtccttccgcaggcgcacggacaaggacacggagcagccaggggaggtgtcggccttggggccgggccgggcgggggcagggccgagtagccggggccggccgggggggccgtggggggagagcccgtccagtggcccctccagccctgagagcagtgaggatgagggcccaggccgcagctccagccccctccgcctggtgcccttctccagccccaggccccccggagagccgccgggtggggagcccctgatggaggactgcgagaagagcagcgacacttgcaaccccctgtcaggcgccttctcaggagtgtccaacattttcagcttctggggggacagtcggggccgccagtaccaggagctccctcgatgccccgcccccacccccagcctcctcaacatccccctctccagcccgggtcggcggccccggggcgacgtggagagcaggctggatgccctccagcgccagctcaacaggctggagatccggctgagtgcagacatggccactgtcctgcagctgctacagaggcagatgacgctggtcccgcccgcctacagtgctgtgaccaccccggggcctggccccacttccacatccccgctgttgcccgtcagccccctccccaccctcaccttggactcgctttctcaggtttcccagttcatggcgtgtgaggagctgcccccgggggccccagagcttccccaagaaggccccacacgacgcctctccctaccgggccagctgggggccctcacctcccagcccctgcacagacacggctcggacccgggcagttagtggggctgcccagtgtggacacgtggctcacccagggatcaaggcgctgctgggccgctccccttggaggccctgctcaggaggccctgaccgtggaaggggagaggaactcgaaagcacagctcctcccccagcccttgggaccatcttctcctgcagtcccctgggccccagtgagaggggcaggggcagggccggcagtaggtggggcctgtggtccccccactgccctgagggcattagctggtctaactgcccggaggcacccggccctgggccttaggcacctcaaggacttttctgctatttactgctcttattgttaaggataataattaaggatcatatgaataattaatgaagatgctgatgactatgaataataaataattatcctgaggaga

SEQ ID NO: 789 - DNA, 3884 bp, Homo sapiens
  source 1..3884: mol_type = genomic DNA
  misc_feature 1..3884: note = cDNA of KCNH2 gene SNP c.3163C>T (p.Arg1055Trp)
atgccggtgcggaggggccacgtcgcgccgcagaacaccttcctggacaccatcatccgcaagtttgagggccagagccgtaagttcatcatcgccaacgctcgggtggagaactgcgccgtcatctactgcaacgacggcttctgcgagctgtgcggctactcgcgggccgaggtgatgcagcgaccctgcacctgcgacttcctgcacgggccgcgcacgcagcgccgcgctgccgcgcagatcgcgcaggcactgctgggcgccgaggagcgcaaagtggaaatcgccttctaccggaaagatgggagctgcttcctatgtctggtggatgtggtgcccgtgaagaacgaggatggggctgtcatcatgttcatcctcaatttcgaggtggtgatggagaaggacatggtggggtccccggctcatgacaccaaccaccggggcccccccaccagctggctggccccaggccgcgccaagaccttccgcctgaagctgcccgcgctgctggcgctgacggcccgggagtcgtcggtgcggtcgggcggcgcgggcggcgcgggcgccccgggggccgtggtggtggacgtggacctgacgcccgcggcacccagcagcgagtcgctggccctggacgaagtgacagccatggacaaccacgtggcagggctcgggcccgcggaggagcggcgtgcgctggtgggtcccggctctccgccccgcagcgcgcccggccagctcccatcgccccgggcgcacagcctcaaccccgacgcctcgggctccagctgcagcctggcccggacgcgctcccgagaaagctgcgccagcgtgcgccgcgcctcgtcggccgacgacatcgaggccatgcgcgccggggtgctgcccccgccaccgcgccacgccagcaccggggccatgcacccactgcgcagcggcttgctcaactccacctcggactccgacctcgtgcgctaccgcaccattagcaagattccccaaatcaccctcaactttgtggacctcaagggcgaccccttcttggcttcgcccaccagtgaccgtgagatcatagcacctaagataaaggagcgaacccacaatgtcactgagaaggtcacccaggtcctgtccctgggcgccgacgtgctgcctgagtacaagctgcaggcaccgcgcatccaccgctggaccatcctgcattacagccccttcaaggccgtgtgggactggctcatcctgctgctggtcatctacacggctgtcttcacaccctactcggctgccttcctgctgaaggagacggaagaaggcccgcctgctaccgagtgtggctacgcctgccagccgctggctgtggtggacctcatcgtggacatcatgttcattgtggacatcctcatcaacttccgcaccacctacgtcaatgccaacgaggaggtggtcagccaccccggccgcatcgccgtccactacttcaagggctggttcctcatcgacatggtggccgccatccccttcgacctgctcatcttcggctctggctctgaggagctgatcgggctgctgaagactgcgcggctgctgcggctggtgcgcgtggcgcggaagctggatcgctactcagagtacggcgcggccgtgctgttcttgctcatgtgcacctttgcgctcatcgcgcactggctagcctgcatctggtacgccatcggcaacatggagcagccacacatggactcacgcatcggctggctgcacaacctgggcgaccagataggcaaaccctacaacagcagcggcctgggcggcccctccatcaaggacaagtatgtgacggcgctctacttcaccttcagcagcctcaccagtgtgggcttcggcaacgtctctcccaacaccaactcagagaagatcttctccatctgcgtcatgctcattggctccctcatgtatgctagcatcttcggcaacgtgtcggccatcatccagcggctgtactcgggcacagcccgctaccacacacagatgctgcgggtgcgggagttcatccgcttccaccagatccccaatcccctgcgccagcgcctcgaggagtacttccagcacgcctggtcctacaccaacggcatcgacatgaacgcggtgctgaagggcttccctgagtgcctgcaggctgacatctgcctgcacctgaaccgctcactgctgcagcactgcaaacccttccgaggggccaccaagggctgccttcgggccctggccatgaagttcaagaccacacatgcaccgccaggggacacactggtgcatgctggggacctgctcaccgccctgtacttcatctcccggggctccatcgagatcctgcggggcgacgtcgtcgtggccatcctggggaagaatgacatctttggggagcctctgaacctgtatgcaaggcctggcaagtcgaacggggatgtgcgggccctcacctactgtgacctacacaagatccatcgggacgacctgctggaggtgctggacatgtaccctgagttctccgaccacttctggtccagcctggagatcaccttcaacctgcgagataccaacatgatcccgggctcccccggcagtacggagttagagggtggcttcagtcggcaacgcaagcgcaagttgtccttccgcaggcgcacggacaaggacacggagcagccaggggaggtgtcggccttggggccgggccgggcgggggcagggccgagtagccggggccggccgggggggccgtggggggagagcccgtccagtggcccctccagccctgagagcagtgaggatgagggcccaggccgcagctccagccccctccgcctggtgcccttctccagccccaggccccccggagagccgccgggtggggagcccctgatggaggactgcgagaagagcagcgacacttgcaaccccctgtcaggcgccttctcaggagtgtccaacattttcagcttctggggggacagtcggggccgccagtaccaggagctccctcgatgccccgcccccacccccagcctcctcaacatccccctctccagcccgggtcggcggccccggggcgacgtggagagcaggctggatgccctccagcgccagctcaacaggctggagacctggctgagtgcagacatggccactgtcctgcagctgctacagaggcagatgacgctggtcccgcccgcctacagtgctgtgaccaccccggggcctggccccacttccacatccccgctgttgcccgtcagccccctccccaccctcaccttggactcgctttctcaggtttcccagttcatggcgtgtgaggagctgcccccgggggccccagagcttccccaagaaggccccacacgacgcctctccctaccgggccagctgggggccctcacctcccagcccctgcacagacacggctcggacccgggcagttagtggggctgcccagtgtggacacgtggctcacccagggatcaaggcgctgctgggccgctccccttggaggccctgctcaggaggccctgaccgtggaaggggagaggaactcgaaagcacagctcctcccccagcccttgggaccatcttctcctgcagtcccctgggccccagtgagaggggcaggggcagggccggcagtaggtggggcctgtggtccccccactgccctgagggcattagctggtctaactgcccggaggcacccggccctgggccttaggcacctcaaggacttttctgctatttactgctcttattgttaaggataataattaaggatcatatgaataattaatgaagatgctgatgactatgaataataaataattatcctgaggaga

SEQ ID NO: 790 - DNA, 3884 bp, Homo sapiens
  source 1..3884: mol_type = genomic DNA
  misc_feature 1..3884: note = cDNA of KCNH2 gene SNP c.3164G>A (p.Arg1055Gln)
atgccggtgcggaggggccacgtcgcgccgcagaacaccttcctggacaccatcatccgcaagtttgagggccagagccgtaagttcatcatcgccaacgctcgggtggagaactgcgccgtcatctactgcaacgacggcttctgcgagctgtgcggctactcgcgggccgaggtgatgcagcgaccctgcacctgcgacttcctgcacgggccgcgcacgcagcgccgcgctgccgcgcagatcgcgcaggcactgctgggcgccgaggagcgcaaagtggaaatcgccttctaccggaaagatgggagctgcttcctatgtctggtggatgtggtgcccgtgaagaacgaggatggggctgtcatcatgttcatcctcaatttcgaggtggtgatggagaaggacatggtggggtccccggctcatgacaccaaccaccggggcccccccaccagctggctggccccaggccgcgccaagaccttccgcctgaagctgcccgcgctgctggcgctgacggcccgggagtcgtcggtgcggtcgggcggcgcgggcggcgcgggcgccccgggggccgtggtggtggacgtggacctgacgcccgcggcacccagcagcgagtcgctggccctggacgaagtgacagccatggacaaccacgtggcagggctcgggcccgcggaggagcggcgtgcgctggtgggtcccggctctccgccccgcagcgcgcccggccagctcccatcgccccgggcgcacagcctcaaccccgacgcctcgggctccagctgcagcctggcccggacgcgctcccgagaaagctgcgccagcgtgcgccgcgcctcgtcggccgacgacatcgaggccatgcgcgccggggtgctgcccccgccaccgcgccacgccagcaccggggccatgcacccactgcgcagcggcttgctcaactccacctcggactccgacctcgtgcgctaccgcaccattagcaagattccccaaatcaccctcaactttgtggacctcaagggcgaccccttcttggcttcgcccaccagtgaccgtgagatcatagcacctaagataaaggagcgaacccacaatgtcactgagaaggtcacccaggtcctgtccctgggcgccgacgtgctgcctgagtacaagctgcaggcaccgcgcatccaccgctggaccatcctgcattacagccccttcaaggccgtgtgggactggctcatcctgctgctggtcatctacacggctgtcttcacaccctactcggctgccttcctgctgaaggagacggaagaaggcccgcctgctaccgagtgtggctacgcctgccagccgctggctgtggtggacctcatcgtggacatcatgttcattgtggacatcctcatcaacttccgcaccacctacgtcaatgccaacgaggaggtggtcagccaccccggccgcatcgccgtccactacttcaagggctggttcctcatcgacatggtggccgccatccccttcgacctgctcatcttcggctctggctctgaggagctgatcgggctgctgaagactgcgcggctgctgcggctggtgcgcgtggcgcggaagctggatcgctactcagagtacggcgcggccgtgctgttcttgctcatgtgcacctttgcgctcatcgcgcactggctagcctgcatctggtacgccatcggcaacatggagcagccacacatggactcacgcatcggctggctgcacaacctgggcgaccagataggcaaaccctacaacagcagcggcctgggcggcccctccatcaaggacaagtatgtgacggcgctctacttcaccttcagcagcctcaccagtgtgggcttcggcaacgtctctcccaacaccaactcagagaagatcttctccatctgcgtcatgctcattggctccctcatgtatgctagcatcttcggcaacgtgtcggccatcatccagcggctgtactcgggcacagcccgctaccacacacagatgctgcgggtgcgggagttcatccgcttccaccagatccccaatcccctgcgccagcgcctcgaggagtacttccagcacgcctggtcctacaccaacggcatcgacatgaacgcggtgctgaagggcttccctgagtgcctgcaggctgacatctgcctgcacctgaaccgctcactgctgcagcactgcaaacccttccgaggggccaccaagggctgccttcgggccctggccatgaagttcaagaccacacatgcaccgccaggggacacactggtgcatgctggggacctgctcaccgccctgtacttcatctcccggggctccatcgagatcctgcggggcgacgtcgtcgtggccatcctggggaagaatgacatctttggggagcctctgaacctgtatgcaaggcctggcaagtcgaacggggatgtgcgggccctcacctactgtgacctacacaagatccatcgggacgacctgctggaggtgctggacatgtaccctgagttctccgaccacttctggtccagcctggagatcaccttcaacctgcgagataccaacatgatcccgggctcccccggcagtacggagttagagggtggcttcagtcggcaacgcaagcgcaagttgtccttccgcaggcgcacggacaaggacacggagcagccaggggaggtgtcggccttggggccgggccgggcgggggcagggccgagtagccggggccggccgggggggccgtggggggagagcccgtccagtggcccctccagccctgagagcagtgaggatgagggcccaggccgcagctccagccccctccgcctggtgcccttctccagccccaggccccccggagagccgccgggtggggagcccctgatggaggactgcgagaagagcagcgacacttgcaaccccctgtcaggcgccttctcaggagtgtccaacattttcagcttctggggggacagtcggggccgccagtaccaggagctccctcgatgccccgcccccacccccagcctcctcaacatccccctctccagcccgggtcggcggccccggggcgacgtggagagcaggctggatgccctccagcgccagctcaacaggctggagacccagctgagtgcagacatggccactgtcctgcagctgctacagaggcagatgacgctggtcccgcccgcctacagtgctgtgaccaccccggggcctggccccacttccacatccccgctgttgcccgtcagccccctccccaccctcaccttggactcgctttctcaggtttcccagttcatggcgtgtgaggagctgcccccgggggccccagagcttccccaagaaggccccacacgacgcctctccctaccgggccagctgggggccctcacctcccagcccctgcacagacacggctcggacccgggcagttagtggggctgcccagtgtggacacgtggctcacccagggatcaaggcgctgctgggccgctccccttggaggccctgctcaggaggccctgaccgtggaaggggagaggaactcgaaagcacagctcctcccccagcccttgggaccatcttctcctgcagtcccctgggccccagtgagaggggcaggggcagggccggcagtaggtggggcctgtggtccccccactgccctgagggcattagctggtctaactgcccggaggcacccggccctgggccttaggcacctcaaggacttttctgctatttactgctcttattgttaaggataataattaaggatcatatgaataattaatgaagatgctgatgactatgaataataaataattatcctgaggaga

SEQ ID NO: 791 - DNA, 3884 bp, Homo sapiens
  source 1..3884: mol_type = genomic DNA
  misc_feature 1..3884: note = cDNA of KCNH2 gene SNP c.3170G>A (p.Ser1057Asn)
atgccggtgcggaggggccacgtcgcgccgcagaacaccttcctggacaccatcatccgcaagtttgagggccagagccgtaagttcatcatcgccaacgctcgggtggagaactgcgccgtcatctactgcaacgacggcttctgcgagctgtgcggctactcgcgggccgaggtgatgcagcgaccctgcacctgcgacttcctgcacgggccgcgcacgcagcgccgcgctgccgcgcagatcgcgcaggcactgctgggcgccgaggagcgcaaagtggaaatcgccttctaccggaaagatgggagctgcttcctatgtctggtggatgtggtgcccgtgaagaacgaggatggggctgtcatcatgttcatcctcaatttcgaggtggtgatggagaaggacatggtggggtccccggctcatgacaccaaccaccggggcccccccaccagctggctggccccaggccgcgccaagaccttccgcctgaagctgcccgcgctgctggcgctgacggcccgggagtcgtcggtgcggtcgggcggcgcgggcggcgcgggcgccccgggggccgtggtggtggacgtggacctgacgcccgcggcacccagcagcgagtcgctggccctggacgaagtgacagccatggacaaccacgtggcagggctcgggcccgcggaggagcggcgtgcgctggtgggtcccggctctccgccccgcagcgcgcccggccagctcccatcgccccgggcgcacagcctcaaccccgacgcctcgggctccagctgcagcctggcccggacgcgctcccgagaaagctgcgccagcgtgcgccgcgcctcgtcggccgacgacatcgaggccatgcgcgccggggtgctgcccccgccaccgcgccacgccagcaccggggccatgcacccactgcgcagcggcttgctcaactccacctcggactccgacctcgtgcgctaccgcaccattagcaagattccccaaatcaccctcaactttgtggacctcaagggcgaccccttcttggcttcgcccaccagtgaccgtgagatcatagcacctaagataaaggagcgaacccacaatgtcactgagaaggtcacccaggtcctgtccctgggcgccgacgtgctgcctgagtacaagctgcaggcaccgcgcatccaccgctggaccatcctgcattacagccccttcaaggccgtgtgggactggctcatcctgctgctggtcatctacacggctgtcttcacaccctactcggctgccttcctgctgaaggagacggaagaaggcccgcctgctaccgagtgtggctacgcctgccagccgctggctgtggtggacctcatcgtggacatcatgttcattgtggacatcctcatcaacttccgcaccacctacgtcaatgccaacgaggaggtggtcagccaccccggccgcatcgccgtccactacttcaagggctggttcctcatcgacatggtggccgccatccccttcgacctgctcatcttcggctctggctctgaggagctgatcgggctgctgaagactgcgcggctgctgcggctggtgcgcgtggcgcggaagctggatcgctactcagagtacggcgcggccgtgctgttcttgctcatgtgcacctttgcgctcatcgcgcactggctagcctgcatctggtacgccatcggcaacatggagcagccacacatggactcacgcatcggctggctgcacaacctgggcgaccagataggcaaaccctacaacagcagcggcctgggcggcccctccatcaaggacaagtatgtgacggcgctctacttcaccttcagcagcctcaccagtgtgggcttcggcaacgtctctcccaacaccaactcagagaagatcttctccatctgcgtcatgctcattggctccctcatgtatgctagcatcttcggcaacgtgtcggccatcatccagcggctgtactcgggcacagcccgctaccacacacagatgctgcgggtgcgggagttcatccgcttccaccagatccccaatcccctgcgccagcgcctcgaggagtacttccagcacgcctggtcctacaccaacggcatcgacatgaacgcggtgctgaagggcttccctgagtgcctgcaggctgacatctgcctgcacctgaaccgctcactgctgcagcactgcaaacccttccgaggggccaccaagggctgccttcgggccctggccatgaagttcaagaccacacatgcaccgccaggggacacactggtgcatgctggggacctgctcaccgccctgtacttcatctcccggggctccatcgagatcctgcggggcgacgtcgtcgtggccatcctggggaagaatgacatctttggggagcctctgaacctgtatgcaaggcctggcaagtcgaacggggatgtgcgggccctcacctactgtgacctacacaagatccatcgggacgacctgctggaggtgctggacatgtaccctgagttctccgaccacttctggtccagcctggagatcaccttcaacctgcgagataccaacatgatcccgggctcccccggcagtacggagttagagggtggcttcagtcggcaacgcaagcgcaagttgtccttccgcaggcgcacggacaaggacacggagcagccaggggaggtgtcggccttggggccgggccgggcgggggcagggccgagtagccggggccggccgggggggccgtggggggagagcccgtccagtggcccctccagccctgagagcagtgaggatgagggcccaggccgcagctccagccccctccgcctggtgcccttctccagccccaggccccccggagagccgccgggtggggagcccctgatggaggactgcgagaagagcagcgacacttgcaaccccctgtcaggcgccttctcaggagtgtccaacattttcagcttctggggggacagtcggggccgccagtaccaggagctccctcgatgccccgcccccacccccagcctcctcaacatccccctctccagcccgggtcggcggccccggggcgacgtggagagcaggctggatgccctccagcgccagctcaacaggctggagacccggctgaatgcagacatggccactgtcctgcagctgctacagaggcagatgacgctggtcccgcccgcctacagtgctgtgaccaccccggggcctggccccacttccacatccccgctgttgcccgtcagccccctccccaccctcaccttggactcgctttctcaggtttcccagttcatggcgtgtgaggagctgcccccgggggccccagagcttccccaagaaggccccacacgacgcctctccctaccgggccagctgggggccctcacctcccagcccctgcacagacacggctcggacccgggcagttagtggggctgcccagtgtggacacgtggctcacccagggatcaaggcgctgctgggccgctccccttggaggccctgctcaggaggccctgaccgtggaaggggagaggaactcgaaagcacagctcctcccccagcccttgggaccatcttctcctgcagtcccctgggccccagtgagaggggcaggggcagggccggcagtaggtggggcctgtggtccccccactgccctgagggcattagctggtctaactgcccggaggcacccggccctgggccttaggcacctcaaggacttttctgctatttactgctcttattgttaaggataataattaaggatcatatgaataattaatgaagatgctgatgactatgaataataaataattatcctgaggaga

SEQ ID NO: 792 - DNA, 3884 bp, Homo sapiens
  source 1..3884: mol_type = genomic DNA
  misc_feature 1..3884: note = cDNA of KCNH2 gene SNP c.3172G>A (p.Ala1058Thr)
atgccggtgcggaggggccacgtcgcgccgcagaacaccttcctggacaccatcatccgcaagtttgagggccagagccgtaagttcatcatcgccaacgctcgggtggagaactgcgccgtcatctactgcaacgacggcttctgcgagctgtgcggctactcgcgggccgaggtgatgcagcgaccctgcacctgcgacttcctgcacgggccgcgcacgcagcgccgcgctgccgcgcagatcgcgcaggcactgctgggcgccgaggagcgcaaagtggaaatcgccttctaccggaaagatgggagctgcttcctatgtctggtggatgtggtgcccgtgaagaacgaggatggggctgtcatcatgttcatcctcaatttcgaggtggtgatggagaaggacatggtggggtccccggctcatgacaccaaccaccggggcccccccaccagctggctggccccaggccgcgccaagaccttccgcctgaagctgcccgcgctgctggcgctgacggcccgggagtcgtcggtgcggtcgggcggcgcgggcggcgcgggcgccccgggggccgtggtggtggacgtggacctgacgcccgcggcacccagcagcgagtcgctggccctggacgaagtgacagccatggacaaccacgtggcagggctcgggcccgcggaggagcggcgtgcgctggtgggtcccggctctccgccccgcagcgcgcccggccagctcccatcgccccgggcgcacagcctcaaccccgacgcctcgggctccagctgcagcctggcccggacgcgctcccgagaaagctgcgccagcgtgcgccgcgcctcgtcggccgacgacatcgaggccatgcgcgccggggtgctgcccccgccaccgcgccacgccagcaccggggccatgcacccactgcgcagcggcttgctcaactccacctcggactccgacctcgtgcgctaccgcaccattagcaagattccccaaatcaccctcaactttgtggacctcaagggcgaccccttcttggcttcgcccaccagtgaccgtgagatcatagcacctaagataaaggagcgaacccacaatgtcactgagaaggtcacccaggtcctgtccctgggcgccgacgtgctgcctgagtacaagctgcaggcaccgcgcatccaccgctggaccatcctgcattacagccccttcaaggccgtgtgggactggctcatcctgctgctggtcatctacacggctgtcttcacaccctactcggctgccttcctgctgaaggagacggaagaaggcccgcctgctaccgagtgtggctacgcctgccagccgctggctgtggtggacctcatcgtggacatcatgttcattgtggacatcctcatcaacttccgcaccacctacgtcaatgccaacgaggaggtggtcagccaccccggccgcatcgccgtccactacttcaagggctggttcctcatcgacatggtggccgccatccccttcgacctgctcatcttcggctctggctctgaggagctgatcgggctgctgaagactgcgcggctgctgcggctggtgcgcgtggcgcggaagctggatcgctactcagagtacggcgcggccgtgctgttcttgctcatgtgcacctttgcgctcatcgcgcactggctagcctgcatctggtacgccatcggcaacatggagcagccacacatggactcacgcatcggctggctgcacaacctgggcgaccagataggcaaaccctacaacagcagcggcctgggcggcccctccatcaaggacaagtatgtgacggcgctctacttcaccttcagcagcctcaccagtgtgggcttcggcaacgtctctcccaacaccaactcagagaagatcttctccatctgcgtcatgctcattggctccctcatgtatgctagcatcttcggcaacgtgtcggccatcatccagcggctgtactcgggcacagcccgctaccacacacagatgctgcgggtgcgggagttcatccgcttccaccagatccccaatcccctgcgccagcgcctcgaggagtacttccagcacgcctggtcctacaccaacggcatcgacatgaacgcggtgctgaagggcttccctgagtgcctgcaggctgacatctgcctgcacctgaaccgctcactgctgcagcactgcaaacccttccgaggggccaccaagggctgccttcgggccctggccatgaagttcaagaccacacatgcaccgccaggggacacactggtgcatgctggggacctgctcaccgccctgtacttcatctcccggggctccatcgagatcctgcggggcgacgtcgtcgtggccatcctggggaagaatgacatctttggggagcctctgaacctgtatgcaaggcctggcaagtcgaacggggatgtgcgggccctcacctactgtgacctacacaagatccatcgggacgacctgctggaggtgctggacatgtaccctgagttctccgaccacttctggtccagcctggagatcaccttcaacctgcgagataccaacatgatcccgggctcccccggcagtacggagttagagggtggcttcagtcggcaacgcaagcgcaagttgtccttccgcaggcgcacggacaaggacacggagcagccaggggaggtgtcggccttggggccgggccgggcgggggcagggccgagtagccggggccggccgggggggccgtggggggagagcccgtccagtggcccctccagccctgagagcagtgaggatgagggcccaggccgcagctccagccccctccgcctggtgcccttctccagccccaggccccccggagagccgccgggtggggagcccctgatggaggactgcgagaagagcagcgacacttgcaaccccctgtcaggcgccttctcaggagtgtccaacattttcagcttctggggggacagtcggggccgccagtaccaggagctccctcgatgccccgcccccacccccagcctcctcaacatccccctctccagcccgggtcggcggccccggggcgacgtggagagcaggctggatgccctccagcgccagctcaacaggctggagacccggctgagtacagacatggccactgtcctgcagctgctacagaggcagatgacgctggtcccgcccgcctacagtgctgtgaccaccccggggcctggccccacttccacatccccgctgttgcccgtcagccccctccccaccctcaccttggactcgctttctcaggtttcccagttcatggcgtgtgaggagctgcccccgggggccccagagcttccccaagaaggccccacacgacgcctctccctaccgggccagctgggggccctcacctcccagcccctgcacagacacggctcggacccgggcagttagtggggctgcccagtgtggacacgtggctcacccagggatcaaggcgctgctgggccgctccccttggaggccctgctcaggaggccctgaccgtggaaggggagaggaactcgaaagcacagctcctcccccagcccttgggaccatcttctcctgcagtcccctgggccccagtgagaggggcaggggcagggccggcagtaggtggggcctgtggtccccccactgccctgagggcattagctggtctaactgcccggaggcacccggccctgggccttaggcacctcaaggacttttctgctatttactgctcttattgttaaggataataattaaggatcatatgaataattaatgaagatgctgatgactatgaataataaataattatcctgaggaga

SEQ ID NO: 793 - DNA, 3884 bp, Homo sapiens
  source 1..3884: mol_type = genomic DNA
  misc_feature 1..3884: note = cDNA of KCNH2 gene SNP c.3173C>A (p.Ala1058Glu)
atgccggtgcggaggggccacgtcgcgccgcagaacaccttcctggacaccatcatccgcaagtttgagggccagagccgtaagttcatcatcgccaacgctcgggtggagaactgcgccgtcatctactgcaacgacggcttctgcgagctgtgcggctactcgcgggccgaggtgatgcagcgaccctgcacctgcgacttcctgcacgggccgcgcacgcagcgccgcgctgccgcgcagatcgcgcaggcactgctgggcgccgaggagcgcaaagtggaaatcgccttctaccggaaagatgggagctgcttcctatgtctggtggatgtggtgcccgtgaagaacgaggatggggctgtcatcatgttcatcctcaatttcgaggtggtgatggagaaggacatggtggggtccccggctcatgacaccaaccaccggggcccccccaccagctggctggccccaggccgcgccaagaccttccgcctgaagctgcccgcgctgctggcgctgacggcccgggagtcgtcggtgcggtcgggcggcgcgggcggcgcgggcgccccgggggccgtggtggtggacgtggacctgacgcccgcggcacccagcagcgagtcgctggccctggacgaagtgacagccatggacaaccacgtggcagggctcgggcccgcggaggagcggcgtgcgctggtgggtcccggctctccgccccgcagcgcgcccggccagctcccatcgccccgggcgcacagcctcaaccccgacgcctcgggctccagctgcagcctggcccggacgcgctcccgagaaagctgcgccagcgtgcgccgcgcctcgtcggccgacgacatcgaggccatgcgcgccggggtgctgcccccgccaccgcgccacgccagcaccggggccatgcacccactgcgcagcggcttgctcaactccacctcggactccgacctcgtgcgctaccgcaccattagcaagattccccaaatcaccctcaactttgtggacctcaagggcgaccccttcttggcttcgcccaccagtgaccgtgagatcatagcacctaagataaaggagcgaacccacaatgtcactgagaaggtcacccaggtcctgtccctgggcgccgacgtgctgcctgagtacaagctgcaggcaccgcgcatccaccgctggaccatcctgcattacagccccttcaaggccgtgtgggactggctcatcctgctgctggtcatctacacggctgtcttcacaccctactcggctgccttcctgctgaaggagacggaagaaggcccgcctgctaccgagtgtggctacgcctgccagccgctggctgtggtggacctcatcgtggacatcatgttcattgtggacatcctcatcaacttccgcaccacctacgtcaatgccaacgaggaggtggtcagccaccccggccgcatcgccgtccactacttcaagggctggttcctcatcgacatggtggccgccatccccttcgacctgctcatcttcggctctggctctgaggagctgatcgggctgctgaagactgcgcggctgctgcggctggtgcgcgtggcgcggaagctggatcgctactcagagtacggcgcggccgtgctgttcttgctcatgtgcacctttgcgctcatcgcgcactggctagcctgcatctggtacgccatcggcaacatggagcagccacacatggactcacgcatcggctggctgcacaacctgggcgaccagataggcaaaccctacaacagcagcggcctgggcggcccctccatcaaggacaagtatgtgacggcgctctacttcaccttcagcagcctcaccagtgtgggcttcggcaacgtctctcccaacaccaactcagagaagatcttctccatctgcgtcatgctcattggctccctcatgtatgctagcatcttcggcaacgtgtcggccatcatccagcggctgtactcgggcacagcccgctaccacacacagatgctgcgggtgcgggagttcatccgcttccaccagatccccaatcccctgcgccagcgcctcgaggagtacttccagcacgcctggtcctacaccaacggcatcgacatgaacgcggtgctgaagggcttccctgagtgcctgcaggctgacatctgcctgcacctgaaccgctcactgctgcagcactgcaaacccttccgaggggccaccaagggctgccttcgggccctggccatgaagttcaagaccacacatgcaccgccaggggacacactggtgcatgctggggacctgctcaccgccctgtacttcatctcccggggctccatcgagatcctgcggggcgacgtcgtcgtggccatcctggggaagaatgacatctttggggagcctctgaacctgtatgcaaggcctggcaagtcgaacggggatgtgcgggccctcacctactgtgacctacacaagatccatcgggacgacctgctggaggtgctggacatgtaccctgagttctccgaccacttctggtccagcctggagatcaccttcaacctgcgagataccaacatgatcccgggctcccccggcagtacggagttagagggtggcttcagtcggcaacgcaagcgcaagttgtccttccgcaggcgcacggacaaggacacggagcagccaggggaggtgtcggccttggggccgggccgggcgggggcagggccgagtagccggggccggccgggggggccgtggggggagagcccgtccagtggcccctccagccctgagagcagtgaggatgagggcccaggccgcagctccagccccctccgcctggtgcccttctccagccccaggccccccggagagccgccgggtggggagcccctgatggaggactgcgagaagagcagcgacacttgcaaccccctgtcaggcgccttctcaggagtgtccaacattttcagcttctggggggacagtcggggccgccagtaccaggagctccctcgatgccccgcccccacccccagcctcctcaacatccccctctccagcccgggtcggcggccccggggcgacgtggagagcaggctggatgccctccagcgccagctcaacaggctggagacccggctgagtgaagacatggccactgtcctgcagctgctacagaggcagatgacgctggtcccgcccgcctacagtgctgtgaccaccccggggcctggccccacttccacatccccgctgttgcccgtcagccccctccccaccctcaccttggactcgctttctcaggtttcccagttcatggcgtgtgaggagctgcccccgggggccccagagcttccccaagaaggccccacacgacgcctctccctaccgggccagctgggggccctcacctcccagcccctgcacagacacggctcggacccgggcagttagtggggctgcccagtgtggacacgtggctcacccagggatcaaggcgctgctgggccgctccccttggaggccctgctcaggaggccctgaccgtggaaggggagaggaactcgaaagcacagctcctcccccagcccttgggaccatcttctcctgcagtcccctgggccccagtgagaggggcaggggcagggccggcagtaggtggggcctgtggtccccccactgccctgagggcattagctggtctaactgcccggaggcacccggccctgggccttaggcacctcaaggacttttctgctatttactgctcttattgttaaggataataattaaggatcatatgaataattaatgaagatgctgatgactatgaataataaataattatcctgaggaga

SEQ ID NO: 794 - DNA, 3884 bp, Homo sapiens
  source 1..3884: mol_type = genomic DNA
  misc_feature 1..3884: note = cDNA of KCNH2 gene SNP c.3178A>G (p.Met1060Val)
atgccggtgcggaggggccacgtcgcgccgcagaacaccttcctggacaccatcatccgcaagtttgagggccagagccgtaagttcatcatcgccaacgctcgggtggagaactgcgccgtcatctactgcaacgacggcttctgcgagctgtgcggctactcgcgggccgaggtgatgcagcgaccctgcacctgcgacttcctgcacgggccgcgcacgcagcgccgcgctgccgcgcagatcgcgcaggcactgctgggcgccgaggagcgcaaagtggaaatcgccttctaccggaaagatgggagctgcttcctatgtctggtggatgtggtgcccgtgaagaacgaggatggggctgtcatcatgttcatcctcaatttcgaggtggtgatggagaaggacatggtggggtccccggctcatgacaccaaccaccggggcccccccaccagctggctggccccaggccgcgccaagaccttccgcctgaagctgcccgcgctgctggcgctgacggcccgggagtcgtcggtgcggtcgggcggcgcgggcggcgcgggcgccccgggggccgtggtggtggacgtggacctgacgcccgcggcacccagcagcgagtcgctggccctggacgaagtgacagccatggacaaccacgtggcagggctcgggcccgcggaggagcggcgtgcgctggtgggtcccggctctccgccccgcagcgcgcccggccagctcccatcgccccgggcgcacagcctcaaccccgacgcctcgggctccagctgcagcctggcccggacgcgctcccgagaaagctgcgccagcgtgcgccgcgcctcgtcggccgacgacatcgaggccatgcgcgccggggtgctgcccccgccaccgcgccacgccagcaccggggccatgcacccactgcgcagcggcttgctcaactccacctcggactccgacctcgtgcgctaccgcaccattagcaagattccccaaatcaccctcaactttgtggacctcaagggcgaccccttcttggcttcgcccaccagtgaccgtgagatcatagcacctaagataaaggagcgaacccacaatgtcactgagaaggtcacccaggtcctgtccctgggcgccgacgtgctgcctgagtacaagctgcaggcaccgcgcatccaccgctggaccatcctgcattacagccccttcaaggccgtgtgggactggctcatcctgctgctggtcatctacacggctgtcttcacaccctactcggctgccttcctgctgaaggagacggaagaaggcccgcctgctaccgagtgtggctacgcctgccagccgctggctgtggtggacctcatcgtggacatcatgttcattgtggacatcctcatcaacttccgcaccacctacgtcaatgccaacgaggaggtggtcagccaccccggccgcatcgccgtccactacttcaagggctggttcctcatcgacatggtggccgccatccccttcgacctgctcatcttcggctctggctctgaggagctgatcgggctgctgaagactgcgcggctgctgcggctggtgcgcgtggcgcggaagctggatcgctactcagagtacggcgcggccgtgctgttcttgctcatgtgcacctttgcgctcatcgcgcactggctagcctgcatctggtacgccatcggcaacatggagcagccacacatggactcacgcatcggctggctgcacaacctgggcgaccagataggcaaaccctacaacagcagcggcctgggcggcccctccatcaaggacaagtatgtgacggcgctctacttcaccttcagcagcctcaccagtgtgggcttcggcaacgtctctcccaacaccaactcagagaagatcttctccatctgcgtcatgctcattggctccctcatgtatgctagcatcttcggcaacgtgtcggccatcatccagcggctgtactcgggcacagcccgctaccacacacagatgctgcgggtgcgggagttcatccgcttccaccagatccccaatcccctgcgccagcgcctcgaggagtacttccagcacgcctggtcctacaccaacggcatcgacatgaacgcggtgctgaagggcttccctgagtgcctgcaggctgacatctgcctgcacctgaaccgctcactgctgcagcactgcaaacccttccgaggggccaccaagggctgccttcgggccctggccatgaagttcaagaccacacatgcaccgccaggggacacactggtgcatgctggggacctgctcaccgccctgtacttcatctcccggggctccatcgagatcctgcggggcgacgtcgtcgtggccatcctggggaagaatgacatctttggggagcctctgaacctgtatgcaaggcctggcaagtcgaacggggatgtgcgggccctcacctactgtgacctacacaagatccatcgggacgacctgctggaggtgctggacatgtaccctgagttctccgaccacttctggtccagcctggagatcaccttcaacctgcgagataccaacatgatcccgggctcccccggcagtacggagttagagggtggcttcagtcggcaacgcaagcgcaagttgtccttccgcaggcgcacggacaaggacacggagcagccaggggaggtgtcggccttggggccgggccgggcgggggcagggccgagtagccggggccggccgggggggccgtggggggagagcccgtccagtggcccctccagccctgagagcagtgaggatgagggcccaggccgcagctccagccccctccgcctggtgcccttctccagccccaggccccccggagagccgccgggtggggagcccctgatggaggactgcgagaagagcagcgacacttgcaaccccctgtcaggcgccttctcaggagtgtccaacattttcagcttctggggggacagtcggggccgccagtaccaggagctccctcgatgccccgcccccacccccagcctcctcaacatccccctctccagcccgggtcggcggccccggggcgacgtggagagcaggctggatgccctccagcgccagctcaacaggctggagacccggctgagtgcagacgtggccactgtcctgcagctgctacagaggcagatgacgctggtcccgcccgcctacagtgctgtgaccaccccggggcctggccccacttccacatccccgctgttgcccgtcagccccctccccaccctcaccttggactcgctttctcaggtttcccagttcatggcgtgtgaggagctgcccccgggggccccagagcttccccaagaaggccccacacgacgcctctccctaccgggccagctgggggccctcacctcccagcccctgcacagacacggctcggacccgggcagttagtggggctgcccagtgtggacacgtggctcacccagggatcaaggcgctgctgggccgctccccttggaggccctgctcaggaggccctgaccgtggaaggggagaggaactcgaaagcacagctcctcccccagcccttgggaccatcttctcctgcagtcccctgggccccagtgagaggggcaggggcagggccggcagtaggtggggcctgtggtccccccactgccctgagggcattagctggtctaactgcccggaggcacccggccctgggccttaggcacctcaaggacttttctgctatttactgctcttattgttaaggataataattaaggatcatatgaataattaatgaagatgctgatgactatgaataataaataattatcctgaggaga

SEQ ID NO: 795 - DNA, 3884 bp, Homo sapiens
  source 1..3884: mol_type = genomic DNA
  misc_feature 1..3884: note = cDNA of KCNH2 gene SNP c.317T>A (p.Phe106Tyr)
atgccggtgcggaggggccacgtcgcgccgcagaacaccttcctggacaccatcatccgcaagtttgagggccagagccgtaagttcatcatcgccaacgctcgggtggagaactgcgccgtcatctactgcaacgacggcttctgcgagctgtgcggctactcgcgggccgaggtgatgcagcgaccctgcacctgcgacttcctgcacgggccgcgcacgcagcgccgcgctgccgcgcagatcgcgcaggcactgctgggcgccgaggagcgcaaagtggaaatcgccttctaccggaaagatgggagctgctacctatgtctggtggatgtggtgcccgtgaagaacgaggatggggctgtcatcatgttcatcctcaatttcgaggtggtgatggagaaggacatggtggggtccccggctcatgacaccaaccaccggggcccccccaccagctggctggccccaggccgcgccaagaccttccgcctgaagctgcccgcgctgctggcgctgacggcccgggagtcgtcggtgcggtcgggcggcgcgggcggcgcgggcgccccgggggccgtggtggtggacgtggacctgacgcccgcggcacccagcagcgagtcgctggccctggacgaagtgacagccatggacaaccacgtggcagggctcgggcccgcggaggagcggcgtgcgctggtgggtcccggctctccgccccgcagcgcgcccggccagctcccatcgccccgggcgcacagcctcaaccccgacgcctcgggctccagctgcagcctggcccggacgcgctcccgagaaagctgcgccagcgtgcgccgcgcctcgtcggccgacgacatcgaggccatgcgcgccggggtgctgcccccgccaccgcgccacgccagcaccggggccatgcacccactgcgcagcggcttgctcaactccacctcggactccgacctcgtgcgctaccgcaccattagcaagattccccaaatcaccctcaactttgtggacctcaagggcgaccccttcttggcttcgcccaccagtgaccgtgagatcatagcacctaagataaaggagcgaacccacaatgtcactgagaaggtcacccaggtcctgtccctgggcgccgacgtgctgcctgagtacaagctgcaggcaccgcgcatccaccgctggaccatcctgcattacagccccttcaaggccgtgtgggactggctcatcctgctgctggtcatctacacggctgtcttcacaccctactcggctgccttcctgctgaaggagacggaagaaggcccgcctgctaccgagtgtggctacgcctgccagccgctggctgtggtggacctcatcgtggacatcatgttcattgtggacatcctcatcaacttccgcaccacctacgtcaatgccaacgaggaggtggtcagccaccccggccgcatcgccgtccactacttcaagggctggttcctcatcgacatggtggccgccatccccttcgacctgctcatcttcggctctggctctgaggagctgatcgggctgctgaagactgcgcggctgctgcggctggtgcgcgtggcgcggaagctggatcgctactcagagtacggcgcggccgtgctgttcttgctcatgtgcacctttgcgctcatcgcgcactggctagcctgcatctggtacgccatcggcaacatggagcagccacacatggactcacgcatcggctggctgcacaacctgggcgaccagataggcaaaccctacaacagcagcggcctgggcggcccctccatcaaggacaagtatgtgacggcgctctacttcaccttcagcagcctcaccagtgtgggcttcggcaacgtctctcccaacaccaactcagagaagatcttctccatctgcgtcatgctcattggctccctcatgtatgctagcatcttcggcaacgtgtcggccatcatccagcggctgtactcgggcacagcccgctaccacacacagatgctgcgggtgcgggagttcatccgcttccaccagatccccaatcccctgcgccagcgcctcgaggagtacttccagcacgcctggtcctacaccaacggcatcgacatgaacgcggtgctgaagggcttccctgagtgcctgcaggctgacatctgcctgcacctgaaccgctcactgctgcagcactgcaaacccttccgaggggccaccaagggctgccttcgggccctggccatgaagttcaagaccacacatgcaccgccaggggacacactggtgcatgctggggacctgctcaccgccctgtacttcatctcccggggctccatcgagatcctgcggggcgacgtcgtcgtggccatcctggggaagaatgacatctttggggagcctctgaacctgtatgcaaggcctggcaagtcgaacggggatgtgcgggccctcacctactgtgacctacacaagatccatcgggacgacctgctggaggtgctggacatgtaccctgagttctccgaccacttctggtccagcctggagatcaccttcaacctgcgagataccaacatgatcccgggctcccccggcagtacggagttagagggtggcttcagtcggcaacgcaagcgcaagttgtccttccgcaggcgcacggacaaggacacggagcagccaggggaggtgtcggccttggggccgggccgggcgggggcagggccgagtagccggggccggccgggggggccgtggggggagagcccgtccagtggcccctccagccctgagagcagtgaggatgagggcccaggccgcagctccagccccctccgcctggtgcccttctccagccccaggccccccggagagccgccgggtggggagcccctgatggaggactgcgagaagagcagcgacacttgcaaccccctgtcaggcgccttctcaggagtgtccaacattttcagcttctggggggacagtcggggccgccagtaccaggagctccctcgatgccccgcccccacccccagcctcctcaacatccccctctccagcccgggtcggcggccccggggcgacgtggagagcaggctggatgccctccagcgccagctcaacaggctggagacccggctgagtgcagacatggccactgtcctgcagctgctacagaggcagatgacgctggtcccgcccgcctacagtgctgtgaccaccccggggcctggccccacttccacatccccgctgttgcccgtcagccccctccccaccctcaccttggactcgctttctcaggtttcccagttcatggcgtgtgaggagctgcccccgggggccccagagcttccccaagaaggccccacacgacgcctctccctaccgggccagctgggggccctcacctcccagcccctgcacagacacggctcggacccgggcagttagtggggctgcccagtgtggacacgtggctcacccagggatcaaggcgctgctgggccgctccccttggaggccctgctcaggaggccctgaccgtggaaggggagaggaactcgaaagcacagctcctcccccagcccttgggaccatcttctcctgcagtcccctgggccccagtgagaggggcaggggcagggccggcagtaggtggggcctgtggtccccccactgccctgagggcattagctggtctaactgcccggaggcacccggccctgggccttaggcacctcaaggacttttctgctatttactgctcttattgttaaggataataattaaggatcatatgaataattaatgaagatgctgatgactatgaataataaataattatcctgaggaga

SEQ ID NO: 796 - DNA, 3884 bp, Homo sapiens
  source 1..3884: mol_type = genomic DNA
  misc_feature 1..3884: note = cDNA of KCNH2 gene SNP c.3185C>T (p.Thr1062Ile)
atgccggtgcggaggggccacgtcgcgccgcagaacaccttcctggacaccatcatccgcaagtttgagggccagagccgtaagttcatcatcgccaacgctcgggtggagaactgcgccgtcatctactgcaacgacggcttctgcgagctgtgcggctactcgcgggccgaggtgatgcagcgaccctgcacctgcgacttcctgcacgggccgcgcacgcagcgccgcgctgccgcgcagatcgcgcaggcactgctgggcgccgaggagcgcaaagtggaaatcgccttctaccggaaagatgggagctgcttcctatgtctggtggatgtggtgcccgtgaagaacgaggatggggctgtcatcatgttcatcctcaatttcgaggtggtgatggagaaggacatggtggggtccccggctcatgacaccaaccaccggggcccccccaccagctggctggccccaggccgcgccaagaccttccgcctgaagctgcccgcgctgctggcgctgacggcccgggagtcgtcggtgcggtcgggcggcgcgggcggcgcgggcgccccgggggccgtggtggtggacgtggacctgacgcccgcggcacccagcagcgagtcgctggccctggacgaagtgacagccatggacaaccacgtggcagggctcgggcccgcggaggagcggcgtgcgctggtgggtcccggctctccgccccgcagcgcgcccggccagctcccatcgccccgggcgcacagcctcaaccccgacgcctcgggctccagctgcagcctggcccggacgcgctcccgagaaagctgcgccagcgtgcgccgcgcctcgtcggccgacgacatcgaggccatgcgcgccggggtgctgcccccgccaccgcgccacgccagcaccggggccatgcacccactgcgcagcggcttgctcaactccacctcggactccgacctcgtgcgctaccgcaccattagcaagattccccaaatcaccctcaactttgtggacctcaagggcgaccccttcttggcttcgcccaccagtgaccgtgagatcatagcacctaagataaaggagcgaacccacaatgtcactgagaaggtcacccaggtcctgtccctgggcgccgacgtgctgcctgagtacaagctgcaggcaccgcgcatccaccgctggaccatcctgcattacagccccttcaaggccgtgtgggactggctcatcctgctgctggtcatctacacggctgtcttcacaccctactcggctgccttcctgctgaaggagacggaagaaggcccgcctgctaccgagtgtggctacgcctgccagccgctggctgtggtggacctcatcgtggacatcatgttcattgtggacatcctcatcaacttccgcaccacctacgtcaatgccaacgaggaggtggtcagccaccccggccgcatcgccgtccactacttcaagggctggttcctcatcgacatggtggccgccatccccttcgacctgctcatcttcggctctggctctgaggagctgatcgggctgctgaagactgcgcggctgctgcggctggtgcgcgtggcgcggaagctggatcgctactcagagtacggcgcggccgtgctgttcttgctcatgtgcacctttgcgctcatcgcgcactggctagcctgcatctggtacgccatcggcaacatggagcagccacacatggactcacgcatcggctggctgcacaacctgggcgaccagataggcaaaccctacaacagcagcggcctgggcggcccctccatcaaggacaagtatgtgacggcgctctacttcaccttcagcagcctcaccagtgtgggcttcggcaacgtctctcccaacaccaactcagagaagatcttctccatctgcgtcatgctcattggctccctcatgtatgctagcatcttcggcaacgtgtcggccatcatccagcggctgtactcgggcacagcccgctaccacacacagatgctgcgggtgcgggagttcatccgcttccaccagatccccaatcccctgcgccagcgcctcgaggagtacttccagcacgcctggtcctacaccaacggcatcgacatgaacgcggtgctgaagggcttccctgagtgcctgcaggctgacatctgcctgcacctgaaccgctcactgctgcagcactgcaaacccttccgaggggccaccaagggctgccttcgggccctggccatgaagttcaagaccacacatgcaccgccaggggacacactggtgcatgctggggacctgctcaccgccctgtacttcatctcccggggctccatcgagatcctgcggggcgacgtcgtcgtggccatcctggggaagaatgacatctttggggagcctctgaacctgtatgcaaggcctggcaagtcgaacggggatgtgcgggccctcacctactgtgacctacacaagatccatcgggacgacctgctggaggtgctggacatgtaccctgagttctccgaccacttctggtccagcctggagatcaccttcaacctgcgagataccaacatgatcccgggctcccccggcagtacggagttagagggtggcttcagtcggcaacgcaagcgcaagttgtccttccgcaggcgcacggacaaggacacggagcagccaggggaggtgtcggccttggggccgggccgggcgggggcagggccgagtagccggggccggccgggggggccgtggggggagagcccgtccagtggcccctccagccctgagagcagtgaggatgagggcccaggccgcagctccagccccctccgcctggtgcccttctccagccccaggccccccggagagccgccgggtggggagcccctgatggaggactgcgagaagagcagcgacacttgcaaccccctgtcaggcgccttctcaggagtgtccaacattttcagcttctggggggacagtcggggccgccagtaccaggagctccctcgatgccccgcccccacccccagcctcctcaacatccccctctccagcccgggtcggcggccccggggcgacgtggagagcaggctggatgccctccagcgccagctcaacaggctggagacccggctgagtgcagacatggccattgtcctgcagctgctacagaggcagatgacgctggtcccgcccgcctacagtgctgtgaccaccccggggcctggccccacttccacatccccgctgttgcccgtcagccccctccccaccctcaccttggactcgctttctcaggtttcccagttcatggcgtgtgaggagctgcccccgggggccccagagcttccccaagaaggccccacacgacgcctctccctaccgggccagctgggggccctcacctcccagcccctgcacagacacggctcggacccgggcagttagtggggctgcccagtgtggacacgtggctcacccagggatcaaggcgctgctgggccgctccccttggaggccctgctcaggaggccctgaccgtggaaggggagaggaactcgaaagcacagctcctcccccagcccttgggaccatcttctcctgcagtcccctgggccccagtgagaggggcaggggcagggccggcagtaggtggggcctgtggtccccccactgccctgagggcattagctggtctaactgcccggaggcacccggccctgggccttaggcacctcaaggacttttctgctatttactgctcttattgttaaggataataattaaggatcatatgaataattaatgaagatgctgatgactatgaataataaataattatcctgaggaga

SEQ ID NO: 797 - DNA, 3884 bp, Homo sapiens
  source 1..3884: mol_type = genomic DNA
  misc_feature 1..3884: note = cDNA of KCNH2 gene SNP c.3187G>C (p.Val1063Leu)
atgccggtgcggaggggccacgtcgcgccgcagaacaccttcctggacaccatcatccgcaagtttgagggccagagccgtaagttcatcatcgccaacgctcgggtggagaactgcgccgtcatctactgcaacgacggcttctgcgagctgtgcggctactcgcgggccgaggtgatgcagcgaccctgcacctgcgacttcctgcacgggccgcgcacgcagcgccgcgctgccgcgcagatcgcgcaggcactgctgggcgccgaggagcgcaaagtggaaatcgccttctaccggaaagatgggagctgcttcctatgtctggtggatgtggtgcccgtgaagaacgaggatggggctgtcatcatgttcatcctcaatttcgaggtggtgatggagaaggacatggtggggtccccggctcatgacaccaaccaccggggcccccccaccagctggctggccccaggccgcgccaagaccttccgcctgaagctgcccgcgctgctggcgctgacggcccgggagtcgtcggtgcggtcgggcggcgcgggcggcgcgggcgccccgggggccgtggtggtggacgtggacctgacgcccgcggcacccagcagcgagtcgctggccctggacgaagtgacagccatggacaaccacgtggcagggctcgggcccgcggaggagcggcgtgcgctggtgggtcccggctctccgccccgcagcgcgcccggccagctcccatcgccccgggcgcacagcctcaaccccgacgcctcgggctccagctgcagcctggcccggacgcgctcccgagaaagctgcgccagcgtgcgccgcgcctcgtcggccgacgacatcgaggccatgcgcgccggggtgctgcccccgccaccgcgccacgccagcaccggggccatgcacccactgcgcagcggcttgctcaactccacctcggactccgacctcgtgcgctaccgcaccattagcaagattccccaaatcaccctcaactttgtggacctcaagggcgaccccttcttggcttcgcccaccagtgaccgtgagatcatagcacctaagataaaggagcgaacccacaatgtcactgagaaggtcacccaggtcctgtccctgggcgccgacgtgctgcctgagtacaagctgcaggcaccgcgcatccaccgctggaccatcctgcattacagccccttcaaggccgtgtgggactggctcatcctgctgctggtcatctacacggctgtcttcacaccctactcggctgccttcctgctgaaggagacggaagaaggcccgcctgctaccgagtgtggctacgcctgccagccgctggctgtggtggacctcatcgtggacatcatgttcattgtggacatcctcatcaacttccgcaccacctacgtcaatgccaacgaggaggtggtcagccaccccggccgcatcgccgtccactacttcaagggctggttcctcatcgacatggtggccgccatccccttcgacctgctcatcttcggctctggctctgaggagctgatcgggctgctgaagactgcgcggctgctgcggctggtgcgcgtggcgcggaagctggatcgctactcagagtacggcgcggccgtgctgttcttgctcatgtgcacctttgcgctcatcgcgcactggctagcctgcatctggtacgccatcggcaacatggagcagccacacatggactcacgcatcggctggctgcacaacctgggcgaccagataggcaaaccctacaacagcagcggcctgggcggcccctccatcaaggacaagtatgtgacggcgctctacttcaccttcagcagcctcaccagtgtgggcttcggcaacgtctctcccaacaccaactcagagaagatcttctccatctgcgtcatgctcattggctccctcatgtatgctagcatcttcggcaacgtgtcggccatcatccagcggctgtactcgggcacagcccgctaccacacacagatgctgcgggtgcgggagttcatccgcttccaccagatccccaatcccctgcgccagcgcctcgaggagtacttccagcacgcctggtcctacaccaacggcatcgacatgaacgcggtgctgaagggcttccctgagtgcctgcaggctgacatctgcctgcacctgaaccgctcactgctgcagcactgcaaacccttccgaggggccaccaagggctgccttcgggccctggccatgaagttcaagaccacacatgcaccgccaggggacacactggtgcatgctggggacctgctcaccgccctgtacttcatctcccggggctccatcgagatcctgcggggcgacgtcgtcgtggccatcctggggaagaatgacatctttggggagcctctgaacctgtatgcaaggcctggcaagtcgaacggggatgtgcgggccctcacctactgtgacctacacaagatccatcgggacgacctgctggaggtgctggacatgtaccctgagttctccgaccacttctggtccagcctggagatcaccttcaacctgcgagataccaacatgatcccgggctcccccggcagtacggagttagagggtggcttcagtcggcaacgcaagcgcaagttgtccttccgcaggcgcacggacaaggacacggagcagccaggggaggtgtcggccttggggccgggccgggcgggggcagggccgagtagccggggccggccgggggggccgtggggggagagcccgtccagtggcccctccagccctgagagcagtgaggatgagggcccaggccgcagctccagccccctccgcctggtgcccttctccagccccaggccccccggagagccgccgggtggggagcccctgatggaggactgcgagaagagcagcgacacttgcaaccccctgtcaggcgccttctcaggagtgtccaacattttcagcttctggggggacagtcggggccgccagtaccaggagctccctcgatgccccgcccccacccccagcctcctcaacatccccctctccagcccgggtcggcggccccggggcgacgtggagagcaggctggatgccctccagcgccagctcaacaggctggagacccggctgagtgcagacatggccactctcctgcagctgctacagaggcagatgacgctggtcccgcccgcctacagtgctgtgaccaccccggggcctggccccacttccacatccccgctgttgcccgtcagccccctccccaccctcaccttggactcgctttctcaggtttcccagttcatggcgtgtgaggagctgcccccgggggccccagagcttccccaagaaggccccacacgacgcctctccctaccgggccagctgggggccctcacctcccagcccctgcacagacacggctcggacccgggcagttagtggggctgcccagtgtggacacgtggctcacccagggatcaaggcgctgctgggccgctccccttggaggccctgctcaggaggccctgaccgtggaaggggagaggaactcgaaagcacagctcctcccccagcccttgggaccatcttctcctgcagtcccctgggccccagtgagaggggcaggggcagggccggcagtaggtggggcctgtggtccccccactgccctgagggcattagctggtctaactgcccggaggcacccggccctgggccttaggcacctcaaggacttttctgctatttactgctcttattgttaaggataataattaaggatcatatgaataattaatgaagatgctgatgactatgaataataaataattatcctgaggaga

SEQ ID NO: 798 - DNA, 3884 bp, Homo sapiens
  source 1..3884: mol_type = genomic DNA
  misc_feature 1..3884: note = cDNA of KCNH2 gene SNP c.318C>A (p.Phe106Leu)
atgccggtgcggaggggccacgtcgcgccgcagaacaccttcctggacaccatcatccgcaagtttgagggccagagccgtaagttcatcatcgccaacgctcgggtggagaactgcgccgtcatctactgcaacgacggcttctgcgagctgtgcggctactcgcgggccgaggtgatgcagcgaccctgcacctgcgacttcctgcacgggccgcgcacgcagcgccgcgctgccgcgcagatcgcgcaggcactgctgggcgccgaggagcgcaaagtggaaatcgccttctaccggaaagatgggagctgcttactatgtctggtggatgtggtgcccgtgaagaacgaggatggggctgtcatcatgttcatcctcaatttcgaggtggtgatggagaaggacatggtggggtccccggctcatgacaccaaccaccggggcccccccaccagctggctggccccaggccgcgccaagaccttccgcctgaagctgcccgcgctgctggcgctgacggcccgggagtcgtcggtgcggtcgggcggcgcgggcggcgcgggcgccccgggggccgtggtggtggacgtggacctgacgcccgcggcacccagcagcgagtcgctggccctggacgaagtgacagccatggacaaccacgtggcagggctcgggcccgcggaggagcggcgtgcgctggtgggtcccggctctccgccccgcagcgcgcccggccagctcccatcgccccgggcgcacagcctcaaccccgacgcctcgggctccagctgcagcctggcccggacgcgctcccgagaaagctgcgccagcgtgcgccgcgcctcgtcggccgacgacatcgaggccatgcgcgccggggtgctgcccccgccaccgcgccacgccagcaccggggccatgcacccactgcgcagcggcttgctcaactccacctcggactccgacctcgtgcgctaccgcaccattagcaagattccccaaatcaccctcaactttgtggacctcaagggcgaccccttcttggcttcgcccaccagtgaccgtgagatcatagcacctaagataaaggagcgaacccacaatgtcactgagaaggtcacccaggtcctgtccctgggcgccgacgtgctgcctgagtacaagctgcaggcaccgcgcatccaccgctggaccatcctgcattacagccccttcaaggccgtgtgggactggctcatcctgctgctggtcatctacacggctgtcttcacaccctactcggctgccttcctgctgaaggagacggaagaaggcccgcctgctaccgagtgtggctacgcctgccagccgctggctgtggtggacctcatcgtggacatcatgttcattgtggacatcctcatcaacttccgcaccacctacgtcaatgccaacgaggaggtggtcagccaccccggccgcatcgccgtccactacttcaagggctggttcctcatcgacatggtggccgccatccccttcgacctgctcatcttcggctctggctctgaggagctgatcgggctgctgaagactgcgcggctgctgcggctggtgcgcgtggcgcggaagctggatcgctactcagagtacggcgcggccgtgctgttcttgctcatgtgcacctttgcgctcatcgcgcactggctagcctgcatctggtacgccatcggcaacatggagcagccacacatggactcacgcatcggctggctgcacaacctgggcgaccagataggcaaaccctacaacagcagcggcctgggcggcccctccatcaaggacaagtatgtgacggcgctctacttcaccttcagcagcctcaccagtgtgggcttcggcaacgtctctcccaacaccaactcagagaagatcttctccatctgcgtcatgctcattggctccctcatgtatgctagcatcttcggcaacgtgtcggccatcatccagcggctgtactcgggcacagcccgctaccacacacagatgctgcgggtgcgggagttcatccgcttccaccagatccccaatcccctgcgccagcgcctcgaggagtacttccagcacgcctggtcctacaccaacggcatcgacatgaacgcggtgctgaagggcttccctgagtgcctgcaggctgacatctgcctgcacctgaaccgctcactgctgcagcactgcaaacccttccgaggggccaccaagggctgccttcgggccctggccatgaagttcaagaccacacatgcaccgccaggggacacactggtgcatgctggggacctgctcaccgccctgtacttcatctcccggggctccatcgagatcctgcggggcgacgtcgtcgtggccatcctggggaagaatgacatctttggggagcctctgaacctgtatgcaaggcctggcaagtcgaacggggatgtgcgggccctcacctactgtgacctacacaagatccatcgggacgacctgctggaggtgctggacatgtaccctgagttctccgaccacttctggtccagcctggagatcaccttcaacctgcgagataccaacatgatcccgggctcccccggcagtacggagttagagggtggcttcagtcggcaacgcaagcgcaagttgtccttccgcaggcgcacggacaaggacacggagcagccaggggaggtgtcggccttggggccgggccgggcgggggcagggccgagtagccggggccggccgggggggccgtggggggagagcccgtccagtggcccctccagccctgagagcagtgaggatgagggcccaggccgcagctccagccccctccgcctggtgcccttctccagccccaggccccccggagagccgccgggtggggagcccctgatggaggactgcgagaagagcagcgacacttgcaaccccctgtcaggcgccttctcaggagtgtccaacattttcagcttctggggggacagtcggggccgccagtaccaggagctccctcgatgccccgcccccacccccagcctcctcaacatccccctctccagcccgggtcggcggccccggggcgacgtggagagcaggctggatgccctccagcgccagctcaacaggctggagacccggctgagtgcagacatggccactgtcctgcagctgctacagaggcagatgacgctggtcccgcccgcctacagtgctgtgaccaccccggggcctggccccacttccacatccccgctgttgcccgtcagccccctccccaccctcaccttggactcgctttctcaggtttcccagttcatggcgtgtgaggagctgcccccgggggccccagagcttccccaagaaggccccacacgacgcctctccctaccgggccagctgggggccctcacctcccagcccctgcacagacacggctcggacccgggcagttagtggggctgcccagtgtggacacgtggctcacccagggatcaaggcgctgctgggccgctccccttggaggccctgctcaggaggccctgaccgtggaaggggagaggaactcgaaagcacagctcctcccccagcccttgggaccatcttctcctgcagtcccctgggccccagtgagaggggcaggggcagggccggcagtaggtggggcctgtggtccccccactgccctgagggcattagctggtctaactgcccggaggcacccggccctgggccttaggcacctcaaggacttttctgctatttactgctcttattgttaaggataataattaaggatcatatgaataattaatgaagatgctgatgactatgaataataaataattatcctgaggaga

SEQ ID NO: 799 - DNA, 3884 bp, Homo sapiens
  source 1..3884: mol_type = genomic DNA
  misc_feature 1..3884: note = cDNA of KCNH2 gene SNP c.3191T>G (p.Leu1064Arg)
atgccggtgcggaggggccacgtcgcgccgcagaacaccttcctggacaccatcatccgcaagtttgagggccagagccgtaagttcatcatcgccaacgctcgggtggagaactgcgccgtcatctactgcaacgacggcttctgcgagctgtgcggctactcgcgggccgaggtgatgcagcgaccctgcacctgcgacttcctgcacgggccgcgcacgcagcgccgcgctgccgcgcagatcgcgcaggcactgctgggcgccgaggagcgcaaagtggaaatcgccttctaccggaaagatgggagctgcttcctatgtctggtggatgtggtgcccgtgaagaacgaggatggggctgtcatcatgttcatcctcaatttcgaggtggtgatggagaaggacatggtggggtccccggctcatgacaccaaccaccggggcccccccaccagctggctggccccaggccgcgccaagaccttccgcctgaagctgcccgcgctgctggcgctgacggcccgggagtcgtcggtgcggtcgggcggcgcgggcggcgcgggcgccccgggggccgtggtggtggacgtggacctgacgcccgcggcacccagcagcgagtcgctggccctggacgaagtgacagccatggacaaccacgtggcagggctcgggcccgcggaggagcggcgtgcgctggtgggtcccggctctccgccccgcagcgcgcccggccagctcccatcgccccgggcgcacagcctcaaccccgacgcctcgggctccagctgcagcctggcccggacgcgctcccgagaaagctgcgccagcgtgcgccgcgcctcgtcggccgacgacatcgaggccatgcgcgccggggtgctgcccccgccaccgcgccacgccagcaccggggccatgcacccactgcgcagcggcttgctcaactccacctcggactccgacctcgtgcgctaccgcaccattagcaagattccccaaatcaccctcaactttgtggacctcaagggcgaccccttcttggcttcgcccaccagtgaccgtgagatcatagcacctaagataaaggagcgaacccacaatgtcactgagaaggtcacccaggtcctgtccctgggcgccgacgtgctgcctgagtacaagctgcaggcaccgcgcatccaccgctggaccatcctgcattacagccccttcaaggccgtgtgggactggctcatcctgctgctggtcatctacacggctgtcttcacaccctactcggctgccttcctgctgaaggagacggaagaaggcccgcctgctaccgagtgtggctacgcctgccagccgctggctgtggtggacctcatcgtggacatcatgttcattgtggacatcctcatcaacttccgcaccacctacgtcaatgccaacgaggaggtggtcagccaccccggccgcatcgccgtccactacttcaagggctggttcctcatcgacatggtggccgccatccccttcgacctgctcatcttcggctctggctctgaggagctgatcgggctgctgaagactgcgcggctgctgcggctggtgcgcgtggcgcggaagctggatcgctactcagagtacggcgcggccgtgctgttcttgctcatgtgcacctttgcgctcatcgcgcactggctagcctgcatctggtacgccatcggcaacatggagcagccacacatggactcacgcatcggctggctgcacaacctgggcgaccagataggcaaaccctacaacagcagcggcctgggcggcccctccatcaaggacaagtatgtgacggcgctctacttcaccttcagcagcctcaccagtgtgggcttcggcaacgtctctcccaacaccaactcagagaagatcttctccatctgcgtcatgctcattggctccctcatgtatgctagcatcttcggcaacgtgtcggccatcatccagcggctgtactcgggcacagcccgctaccacacacagatgctgcgggtgcgggagttcatccgcttccaccagatccccaatcccctgcgccagcgcctcgaggagtacttccagcacgcctggtcctacaccaacggcatcgacatgaacgcggtgctgaagggcttccctgagtgcctgcaggctgacatctgcctgcacctgaaccgctcactgctgcagcactgcaaacccttccgaggggccaccaagggctgccttcgggccctggccatgaagttcaagaccacacatgcaccgccaggggacacactggtgcatgctggggacctgctcaccgccctgtacttcatctcccggggctccatcgagatcctgcggggcgacgtcgtcgtggccatcctggggaagaatgacatctttggggagcctctgaacctgtatgcaaggcctggcaagtcgaacggggatgtgcgggccctcacctactgtgacctacacaagatccatcgggacgacctgctggaggtgctggacatgtaccctgagttctccgaccacttctggtccagcctggagatcaccttcaacctgcgagataccaacatgatcccgggctcccccggcagtacggagttagagggtggcttcagtcggcaacgcaagcgcaagttgtccttccgcaggcgcacggacaaggacacggagcagccaggggaggtgtcggccttggggccgggccgggcgggggcagggccgagtagccggggccggccgggggggccgtggggggagagcccgtccagtggcccctccagccctgagagcagtgaggatgagggcccaggccgcagctccagccccctccgcctggtgcccttctccagccccaggccccccggagagccgccgggtggggagcccctgatggaggactgcgagaagagcagcgacacttgcaaccccctgtcaggcgccttctcaggagtgtccaacattttcagcttctggggggacagtcggggccgccagtaccaggagctccctcgatgccccgcccccacccccagcctcctcaacatccccctctccagcccgggtcggcggccccggggcgacgtggagagcaggctggatgccctccagcgccagctcaacaggctggagacccggctgagtgcagacatggccactgtccggcagctgctacagaggcagatgacgctggtcccgcccgcctacagtgctgtgaccaccccggggcctggccccacttccacatccccgctgttgcccgtcagccccctccccaccctcaccttggactcgctttctcaggtttcccagttcatggcgtgtgaggagctgcccccgggggccccagagcttccccaagaaggccccacacgacgcctctccctaccgggccagctgggggccctcacctcccagcccctgcacagacacggctcggacccgggcagttagtggggctgcccagtgtggacacgtggctcacccagggatcaaggcgctgctgggccgctccccttggaggccctgctcaggaggccctgaccgtggaaggggagaggaactcgaaagcacagctcctcccccagcccttgggaccatcttctcctgcagtcccctgggccccagtgagaggggcaggggcagggccggcagtaggtggggcctgtggtccccccactgccctgagggcattagctggtctaactgcccggaggcacccggccctgggccttaggcacctcaaggacttttctgctatttactgctcttattgttaaggataataattaaggatcatatgaataattaatgaagatgctgatgactatgaataataaataattatcctgaggaga

SEQ ID NO: 800 - DNA, 3884 bp, Homo sapiens
  source 1..3884: mol_type = genomic DNA
  misc_feature 1..3884: note = cDNA of KCNH2 gene SNP c.3193C>T (p.Gln1065Ter)
atgccggtgcggaggggccacgtcgcgccgcagaacaccttcctggacaccatcatccgcaagtttgagggccagagccgtaagttcatcatcgccaacgctcgggtggagaactgcgccgtcatctactgcaacgacggcttctgcgagctgtgcggctactcgcgggccgaggtgatgcagcgaccctgcacctgcgacttcctgcacgggccgcgcacgcagcgccgcgctgccgcgcagatcgcgcaggcactgctgggcgccgaggagcgcaaagtggaaatcgccttctaccggaaagatgggagctgcttcctatgtctggtggatgtggtgcccgtgaagaacgaggatggggctgtcatcatgttcatcctcaatttcgaggtggtgatggagaaggacatggtggggtccccggctcatgacaccaaccaccggggcccccccaccagctggctggccccaggccgcgccaagaccttccgcctgaagctgcccgcgctgctggcgctgacggcccgggagtcgtcggtgcggtcgggcggcgcgggcggcgcgggcgccccgggggccgtggtggtggacgtggacctgacgcccgcggcacccagcagcgagtcgctggccctggacgaagtgacagccatggacaaccacgtggcagggctcgggcccgcggaggagcggcgtgcgctggtgggtcccggctctccgccccgcagcgcgcccggccagctcccatcgccccgggcgcacagcctcaaccccgacgcctcgggctccagctgcagcctggcccggacgcgctcccgagaaagctgcgccagcgtgcgccgcgcctcgtcggccgacgacatcgaggccatgcgcgccggggtgctgcccccgccaccgcgccacgccagcaccggggccatgcacccactgcgcagcggcttgctcaactccacctcggactccgacctcgtgcgctaccgcaccattagcaagattccccaaatcaccctcaactttgtggacctcaagggcgaccccttcttggcttcgcccaccagtgaccgtgagatcatagcacctaagataaaggagcgaacccacaatgtcactgagaaggtcacccaggtcctgtccctgggcgccgacgtgctgcctgagtacaagctgcaggcaccgcgcatccaccgctggaccatcctgcattacagccccttcaaggccgtgtgggactggctcatcctgctgctggtcatctacacggctgtcttcacaccctactcggctgccttcctgctgaaggagacggaagaaggcccgcctgctaccgagtgtggctacgcctgccagccgctggctgtggtggacctcatcgtggacatcatgttcattgtggacatcctcatcaacttccgcaccacctacgtcaatgccaacgaggaggtggtcagccaccccggccgcatcgccgtccactacttcaagggctggttcctcatcgacatggtggccgccatccccttcgacctgctcatcttcggctctggctctgaggagctgatcgggctgctgaagactgcgcggctgctgcggctggtgcgcgtggcgcggaagctggatcgctactcagagtacggcgcggccgtgctgttcttgctcatgtgcacctttgcgctcatcgcgcactggctagcctgcatctggtacgccatcggcaacatggagcagccacacatggactcacgcatcggctggctgcacaacctgggcgaccagataggcaaaccctacaacagcagcggcctgggcggcccctccatcaaggacaagtatgtgacggcgctctacttcaccttcagcagcctcaccagtgtgggcttcggcaacgtctctcccaacaccaactcagagaagatcttctccatctgcgtcatgctcattggctccctcatgtatgctagcatcttcggcaacgtgtcggccatcatccagcggctgtactcgggcacagcccgctaccacacacagatgctgcgggtgcgggagttcatccgcttccaccagatccccaatcccctgcgccagcgcctcgaggagtacttccagcacgcctggtcctacaccaacggcatcgacatgaacgcggtgctgaagggcttccctgagtgcctgcaggctgacatctgcctgcacctgaaccgctcactgctgcagcactgcaaacccttccgaggggccaccaagggctgccttcgggccctggccatgaagttcaagaccacacatgcaccgccaggggacacactggtgcatgctggggacctgctcaccgccctgtacttcatctcccggggctccatcgagatcctgcggggcgacgtcgtcgtggccatcctggggaagaatgacatctttggggagcctctgaacctgtatgcaaggcctggcaagtcgaacggggatgtgcgggccctcacctactgtgacctacacaagatccatcgggacgacctgctggaggtgctggacatgtaccctgagttctccgaccacttctggtccagcctggagatcaccttcaacctgcgagataccaacatgatcccgggctcccccggcagtacggagttagagggtggcttcagtcggcaacgcaagcgcaagttgtccttccgcaggcgcacggacaaggacacggagcagccaggggaggtgtcggccttggggccgggccgggcgggggcagggccgagtagccggggccggccgggggggccgtggggggagagcccgtccagtggcccctccagccctgagagcagtgaggatgagggcccaggccgcagctccagccccctccgcctggtgcccttctccagccccaggccccccggagagccgccgggtggggagcccctgatggaggactgcgagaagagcagcgacacttgcaaccccctgtcaggcgccttctcaggagtgtccaacattttcagcttctggggggacagtcggggccgccagtaccaggagctccctcgatgccccgcccccacccccagcctcctcaacatccccctctccagcccgggtcggcggccccggggcgacgtggagagcaggctggatgccctccagcgccagctcaacaggctggagacccggctgagtgcagacatggccactgtcctgtagctgctacagaggcagatgacgctggtcccgcccgcctacagtgctgtgaccaccccggggcctggccccacttccacatccccgctgttgcccgtcagccccctccccaccctcaccttggactcgctttctcaggtttcccagttcatggcgtgtgaggagctgcccccgggggccccagagcttccccaagaaggccccacacgacgcctctccctaccgggccagctgggggccctcacctcccagcccctgcacagacacggctcggacccgggcagttagtggggctgcccagtgtggacacgtggctcacccagggatcaaggcgctgctgggccgctccccttggaggccctgctcaggaggccctgaccgtggaaggggagaggaactcgaaagcacagctcctcccccagcccttgggaccatcttctcctgcagtcccctgggccccagtgagaggggcaggggcagggccggcagtaggtggggcctgtggtccccccactgccctgagggcattagctggtctaactgcccggaggcacccggccctgggccttaggcacctcaaggacttttctgctatttactgctcttattgttaaggataataattaaggatcatatgaataattaatgaagatgctgatgactatgaataataaataattatcctgaggaga

SEQ ID NO: 801 - DNA, 3884 bp, Homo sapiens
  source 1..3884: mol_type = genomic DNA
  misc_feature 1..3884: note = cDNA of KCNH2 gene SNP c.3196C>G (p.Leu1066Val)
atgccggtgcggaggggccacgtcgcgccgcagaacaccttcctggacaccatcatccgcaagtttgagggccagagccgtaagttcatcatcgccaacgctcgggtggagaactgcgccgtcatctactgcaacgacggcttctgcgagctgtgcggctactcgcgggccgaggtgatgcagcgaccctgcacctgcgacttcctgcacgggccgcgcacgcagcgccgcgctgccgcgcagatcgcgcaggcactgctgggcgccgaggagcgcaaagtggaaatcgccttctaccggaaagatgggagctgcttcctatgtctggtggatgtggtgcccgtgaagaacgaggatggggctgtcatcatgttcatcctcaatttcgaggtggtgatggagaaggacatggtggggtccccggctcatgacaccaaccaccggggcccccccaccagctggctggccccaggccgcgccaagaccttccgcctgaagctgcccgcgctgctggcgctgacggcccgggagtcgtcggtgcggtcgggcggcgcgggcggcgcgggcgccccgggggccgtggtggtggacgtggacctgacgcccgcggcacccagcagcgagtcgctggccctggacgaagtgacagccatggacaaccacgtggcagggctcgggcccgcggaggagcggcgtgcgctggtgggtcccggctctccgccccgcagcgcgcccggccagctcccatcgccccgggcgcacagcctcaaccccgacgcctcgggctccagctgcagcctggcccggacgcgctcccgagaaagctgcgccagcgtgcgccgcgcctcgtcggccgacgacatcgaggccatgcgcgccggggtgctgcccccgccaccgcgccacgccagcaccggggccatgcacccactgcgcagcggcttgctcaactccacctcggactccgacctcgtgcgctaccgcaccattagcaagattccccaaatcaccctcaactttgtggacctcaagggcgaccccttcttggcttcgcccaccagtgaccgtgagatcatagcacctaagataaaggagcgaacccacaatgtcactgagaaggtcacccaggtcctgtccctgggcgccgacgtgctgcctgagtacaagctgcaggcaccgcgcatccaccgctggaccatcctgcattacagccccttcaaggccgtgtgggactggctcatcctgctgctggtcatctacacggctgtcttcacaccctactcggctgccttcctgctgaaggagacggaagaaggcccgcctgctaccgagtgtggctacgcctgccagccgctggctgtggtggacctcatcgtggacatcatgttcattgtggacatcctcatcaacttccgcaccacctacgtcaatgccaacgaggaggtggtcagccaccccggccgcatcgccgtccactacttcaagggctggttcctcatcgacatggtggccgccatccccttcgacctgctcatcttcggctctggctctgaggagctgatcgggctgctgaagactgcgcggctgctgcggctggtgcgcgtggcgcggaagctggatcgctactcagagtacggcgcggccgtgctgttcttgctcatgtgcacctttgcgctcatcgcgcactggctagcctgcatctggtacgccatcggcaacatggagcagccacacatggactcacgcatcggctggctgcacaacctgggcgaccagataggcaaaccctacaacagcagcggcctgggcggcccctccatcaaggacaagtatgtgacggcgctctacttcaccttcagcagcctcaccagtgtgggcttcggcaacgtctctcccaacaccaactcagagaagatcttctccatctgcgtcatgctcattggctccctcatgtatgctagcatcttcggcaacgtgtcggccatcatccagcggctgtactcgggcacagcccgctaccacacacagatgctgcgggtgcgggagttcatccgcttccaccagatccccaatcccctgcgccagcgcctcgaggagtacttccagcacgcctggtcctacaccaacggcatcgacatgaacgcggtgctgaagggcttccctgagtgcctgcaggctgacatctgcctgcacctgaaccgctcactgctgcagcactgcaaacccttccgaggggccaccaagggctgccttcgggccctggccatgaagttcaagaccacacatgcaccgccaggggacacactggtgcatgctggggacctgctcaccgccctgtacttcatctcccggggctccatcgagatcctgcggggcgacgtcgtcgtggccatcctggggaagaatgacatctttggggagcctctgaacctgtatgcaaggcctggcaagtcgaacggggatgtgcgggccctcacctactgtgacctacacaagatccatcgggacgacctgctggaggtgctggacatgtaccctgagttctccgaccacttctggtccagcctggagatcaccttcaacctgcgagataccaacatgatcccgggctcccccggcagtacggagttagagggtggcttcagtcggcaacgcaagcgcaagttgtccttccgcaggcgcacggacaaggacacggagcagccaggggaggtgtcggccttggggccgggccgggcgggggcagggccgagtagccggggccggccgggggggccgtggggggagagcccgtccagtggcccctccagccctgagagcagtgaggatgagggcccaggccgcagctccagccccctccgcctggtgcccttctccagccccaggccccccggagagccgccgggtggggagcccctgatggaggactgcgagaagagcagcgacacttgcaaccccctgtcaggcgccttctcaggagtgtccaacattttcagcttctggggggacagtcggggccgccagtaccaggagctccctcgatgccccgcccccacccccagcctcctcaacatccccctctccagcccgggtcggcggccccggggcgacgtggagagcaggctggatgccctccagcgccagctcaacaggctggagacccggctgagtgcagacatggccactgtcctgcaggtgctacagaggcagatgacgctggtcccgcccgcctacagtgctgtgaccaccccggggcctggccccacttccacatccccgctgttgcccgtcagccccctccccaccctcaccttggactcgctttctcaggtttcccagttcatggcgtgtgaggagctgcccccgggggccccagagcttccccaagaaggccccacacgacgcctctccctaccgggccagctgggggccctcacctcccagcccctgcacagacacggctcggacccgggcagttagtggggctgcccagtgtggacacgtggctcacccagggatcaaggcgctgctgggccgctccccttggaggccctgctcaggaggccctgaccgtggaaggggagaggaactcgaaagcacagctcctcccccagcccttgggaccatcttctcctgcagtcccctgggccccagtgagaggggcaggggcagggccggcagtaggtggggcctgtggtccccccactgccctgagggcattagctggtctaactgcccggaggcacccggccctgggccttaggcacctcaaggacttttctgctatttactgctcttattgttaaggataataattaaggatcatatgaataattaatgaagatgctgatgactatgaataataaataattatcctgaggaga

SEQ ID NO: 802 - DNA, 3884 bp, Homo sapiens
  source 1..3884: mol_type = genomic DNA
  misc_feature 1..3884: note = cDNA of KCNH2 gene SNP c.31C>T (p.Gln11Ter)
atgccggtgcggaggggccacgtcgcgccgtagaacaccttcctggacaccatcatccgcaagtttgagggccagagccgtaagttcatcatcgccaacgctcgggtggagaactgcgccgtcatctactgcaacgacggcttctgcgagctgtgcggctactcgcgggccgaggtgatgcagcgaccctgcacctgcgacttcctgcacgggccgcgcacgcagcgccgcgctgccgcgcagatcgcgcaggcactgctgggcgccgaggagcgcaaagtggaaatcgccttctaccggaaagatgggagctgcttcctatgtctggtggatgtggtgcccgtgaagaacgaggatggggctgtcatcatgttcatcctcaatttcgaggtggtgatggagaaggacatggtggggtccccggctcatgacaccaaccaccggggcccccccaccagctggctggccccaggccgcgccaagaccttccgcctgaagctgcccgcgctgctggcgctgacggcccgggagtcgtcggtgcggtcgggcggcgcgggcggcgcgggcgccccgggggccgtggtggtggacgtggacctgacgcccgcggcacccagcagcgagtcgctggccctggacgaagtgacagccatggacaaccacgtggcagggctcgggcccgcggaggagcggcgtgcgctggtgggtcccggctctccgccccgcagcgcgcccggccagctcccatcgccccgggcgcacagcctcaaccccgacgcctcgggctccagctgcagcctggcccggacgcgctcccgagaaagctgcgccagcgtgcgccgcgcctcgtcggccgacgacatcgaggccatgcgcgccggggtgctgcccccgccaccgcgccacgccagcaccggggccatgcacccactgcgcagcggcttgctcaactccacctcggactccgacctcgtgcgctaccgcaccattagcaagattccccaaatcaccctcaactttgtggacctcaagggcgaccccttcttggcttcgcccaccagtgaccgtgagatcatagcacctaagataaaggagcgaacccacaatgtcactgagaaggtcacccaggtcctgtccctgggcgccgacgtgctgcctgagtacaagctgcaggcaccgcgcatccaccgctggaccatcctgcattacagccccttcaaggccgtgtgggactggctcatcctgctgctggtcatctacacggctgtcttcacaccctactcggctgccttcctgctgaaggagacggaagaaggcccgcctgctaccgagtgtggctacgcctgccagccgctggctgtggtggacctcatcgtggacatcatgttcattgtggacatcctcatcaacttccgcaccacctacgtcaatgccaacgaggaggtggtcagccaccccggccgcatcgccgtccactacttcaagggctggttcctcatcgacatggtggccgccatccccttcgacctgctcatcttcggctctggctctgaggagctgatcgggctgctgaagactgcgcggctgctgcggctggtgcgcgtggcgcggaagctggatcgctactcagagtacggcgcggccgtgctgttcttgctcatgtgcacctttgcgctcatcgcgcactggctagcctgcatctggtacgccatcggcaacatggagcagccacacatggactcacgcatcggctggctgcacaacctgggcgaccagataggcaaaccctacaacagcagcggcctgggcggcccctccatcaaggacaagtatgtgacggcgctctacttcaccttcagcagcctcaccagtgtgggcttcggcaacgtctctcccaacaccaactcagagaagatcttctccatctgcgtcatgctcattggctccctcatgtatgctagcatcttcggcaacgtgtcggccatcatccagcggctgtactcgggcacagcccgctaccacacacagatgctgcgggtgcgggagttcatccgcttccaccagatccccaatcccctgcgccagcgcctcgaggagtacttccagcacgcctggtcctacaccaacggcatcgacatgaacgcggtgctgaagggcttccctgagtgcctgcaggctgacatctgcctgcacctgaaccgctcactgctgcagcactgcaaacccttccgaggggccaccaagggctgccttcgggccctggccatgaagttcaagaccacacatgcaccgccaggggacacactggtgcatgctggggacctgctcaccgccctgtacttcatctcccggggctccatcgagatcctgcggggcgacgtcgtcgtggccatcctggggaagaatgacatctttggggagcctctgaacctgtatgcaaggcctggcaagtcgaacggggatgtgcgggccctcacctactgtgacctacacaagatccatcgggacgacctgctggaggtgctggacatgtaccctgagttctccgaccacttctggtccagcctggagatcaccttcaacctgcgagataccaacatgatcccgggctcccccggcagtacggagttagagggtggcttcagtcggcaacgcaagcgcaagttgtccttccgcaggcgcacggacaaggacacggagcagccaggggaggtgtcggccttggggccgggccgggcgggggcagggccgagtagccggggccggccgggggggccgtggggggagagcccgtccagtggcccctccagccctgagagcagtgaggatgagggcccaggccgcagctccagccccctccgcctggtgcccttctccagccccaggccccccggagagccgccgggtggggagcccctgatggaggactgcgagaagagcagcgacacttgcaaccccctgtcaggcgccttctcaggagtgtccaacattttcagcttctggggggacagtcggggccgccagtaccaggagctccctcgatgccccgcccccacccccagcctcctcaacatccccctctccagcccgggtcggcggccccggggcgacgtggagagcaggctggatgccctccagcgccagctcaacaggctggagacccggctgagtgcagacatggccactgtcctgcagctgctacagaggcagatgacgctggtcccgcccgcctacagtgctgtgaccaccccggggcctggccccacttccacatccccgctgttgcccgtcagccccctccccaccctcaccttggactcgctttctcaggtttcccagttcatggcgtgtgaggagctgcccccgggggccccagagcttccccaagaaggccccacacgacgcctctccctaccgggccagctgggggccctcacctcccagcccctgcacagacacggctcggacccgggcagttagtggggctgcccagtgtggacacgtggctcacccagggatcaaggcgctgctgggccgctccccttggaggccctgctcaggaggccctgaccgtggaaggggagaggaactcgaaagcacagctcctcccccagcccttgggaccatcttctcctgcagtcccctgggccccagtgagaggggcaggggcagggccggcagtaggtggggcctgtggtccccccactgccctgagggcattagctggtctaactgcccggaggcacccggccctgggccttaggcacctcaaggacttttctgctatttactgctcttattgttaaggataataattaaggatcatatgaataattaatgaagatgctgatgactatgaataataaataattatcctgaggaga

SEQ ID NO: 803 - DNA, 3884 bp, Homo sapiens
  source 1..3884: mol_type = genomic DNA
  misc_feature 1..3884: note = cDNA of KCNH2 gene SNP c.3202C>T (p.Gln1068Ter)
atgccggtgcggaggggccacgtcgcgccgcagaacaccttcctggacaccatcatccgcaagtttgagggccagagccgtaagttcatcatcgccaacgctcgggtggagaactgcgccgtcatctactgcaacgacggcttctgcgagctgtgcggctactcgcgggccgaggtgatgcagcgaccctgcacctgcgacttcctgcacgggccgcgcacgcagcgccgcgctgccgcgcagatcgcgcaggcactgctgggcgccgaggagcgcaaagtggaaatcgccttctaccggaaagatgggagctgcttcctatgtctggtggatgtggtgcccgtgaagaacgaggatggggctgtcatcatgttcatcctcaatttcgaggtggtgatggagaaggacatggtggggtccccggctcatgacaccaaccaccggggcccccccaccagctggctggccccaggccgcgccaagaccttccgcctgaagctgcccgcgctgctggcgctgacggcccgggagtcgtcggtgcggtcgggcggcgcgggcggcgcgggcgccccgggggccgtggtggtggacgtggacctgacgcccgcggcacccagcagcgagtcgctggccctggacgaagtgacagccatggacaaccacgtggcagggctcgggcccgcggaggagcggcgtgcgctggtgggtcccggctctccgccccgcagcgcgcccggccagctcccatcgccccgggcgcacagcctcaaccccgacgcctcgggctccagctgcagcctggcccggacgcgctcccgagaaagctgcgccagcgtgcgccgcgcctcgtcggccgacgacatcgaggccatgcgcgccggggtgctgcccccgccaccgcgccacgccagcaccggggccatgcacccactgcgcagcggcttgctcaactccacctcggactccgacctcgtgcgctaccgcaccattagcaagattccccaaatcaccctcaactttgtggacctcaagggcgaccccttcttggcttcgcccaccagtgaccgtgagatcatagcacctaagataaaggagcgaacccacaatgtcactgagaaggtcacccaggtcctgtccctgggcgccgacgtgctgcctgagtacaagctgcaggcaccgcgcatccaccgctggaccatcctgcattacagccccttcaaggccgtgtgggactggctcatcctgctgctggtcatctacacggctgtcttcacaccctactcggctgccttcctgctgaaggagacggaagaaggcccgcctgctaccgagtgtggctacgcctgccagccgctggctgtggtggacctcatcgtggacatcatgttcattgtggacatcctcatcaacttccgcaccacctacgtcaatgccaacgaggaggtggtcagccaccccggccgcatcgccgtccactacttcaagggctggttcctcatcgacatggtggccgccatccccttcgacctgctcatcttcggctctggctctgaggagctgatcgggctgctgaagactgcgcggctgctgcggctggtgcgcgtggcgcggaagctggatcgctactcagagtacggcgcggccgtgctgttcttgctcatgtgcacctttgcgctcatcgcgcactggctagcctgcatctggtacgccatcggcaacatggagcagccacacatggactcacgcatcggctggctgcacaacctgggcgaccagataggcaaaccctacaacagcagcggcctgggcggcccctccatcaaggacaagtatgtgacggcgctctacttcaccttcagcagcctcaccagtgtgggcttcggcaacgtctctcccaacaccaactcagagaagatcttctccatctgcgtcatgctcattggctccctcatgtatgctagcatcttcggcaacgtgtcggccatcatccagcggctgtactcgggcacagcccgctaccacacacagatgctgcgggtgcgggagttcatccgcttccaccagatccccaatcccctgcgccagcgcctcgaggagtacttccagcacgcctggtcctacaccaacggcatcgacatgaacgcggtgctgaagggcttccctgagtgcctgcaggctgacatctgcctgcacctgaaccgctcactgctgcagcactgcaaacccttccgaggggccaccaagggctgccttcgggccctggccatgaagttcaagaccacacatgcaccgccaggggacacactggtgcatgctggggacctgctcaccgccctgtacttcatctcccggggctccatcgagatcctgcggggcgacgtcgtcgtggccatcctggggaagaatgacatctttggggagcctctgaacctgtatgcaaggcctggcaagtcgaacggggatgtgcgggccctcacctactgtgacctacacaagatccatcgggacgacctgctggaggtgctggacatgtaccctgagttctccgaccacttctggtccagcctggagatcaccttcaacctgcgagataccaacatgatcccgggctcccccggcagtacggagttagagggtggcttcagtcggcaacgcaagcgcaagttgtccttccgcaggcgcacggacaaggacacggagcagccaggggaggtgtcggccttggggccgggccgggcgggggcagggccgagtagccggggccggccgggggggccgtggggggagagcccgtccagtggcccctccagccctgagagcagtgaggatgagggcccaggccgcagctccagccccctccgcctggtgcccttctccagccccaggccccccggagagccgccgggtggggagcccctgatggaggactgcgagaagagcagcgacacttgcaaccccctgtcaggcgccttctcaggagtgtccaacattttcagcttctggggggacagtcggggccgccagtaccaggagctccctcgatgccccgcccccacccccagcctcctcaacatccccctctccagcccgggtcggcggccccggggcgacgtggagagcaggctggatgccctccagcgccagctcaacaggctggagacccggctgagtgcagacatggccactgtcctgcagctgctatagaggcagatgacgctggtcccgcccgcctacagtgctgtgaccaccccggggcctggccccacttccacatccccgctgttgcccgtcagccccctccccaccctcaccttggactcgctttctcaggtttcccagttcatggcgtgtgaggagctgcccccgggggccccagagcttccccaagaaggccccacacgacgcctctccctaccgggccagctgggggccctcacctcccagcccctgcacagacacggctcggacccgggcagttagtggggctgcccagtgtggacacgtggctcacccagggatcaaggcgctgctgggccgctccccttggaggccctgctcaggaggccctgaccgtggaaggggagaggaactcgaaagcacagctcctcccccagcccttgggaccatcttctcctgcagtcccctgggccccagtgagaggggcaggggcagggccggcagtaggtggggcctgtggtccccccactgccctgagggcattagctggtctaactgcccggaggcacccggccctgggccttaggcacctcaaggacttttctgctatttactgctcttattgttaaggataataattaaggatcatatgaataattaatgaagatgctgatgactatgaataataaataattatcctgaggaga

SEQ ID NO: 804 - DNA, 3884 bp, Homo sapiens
  source 1..3884: mol_type = genomic DNA
  misc_feature 1..3884: note = cDNA of KCNH2 gene SNP c.3203A>G (p.Gln1068Arg)
atgccggtgcggaggggccacgtcgcgccgcagaacaccttcctggacaccatcatccgcaagtttgagggccagagccgtaagttcatcatcgccaacgctcgggtggagaactgcgccgtcatctactgcaacgacggcttctgcgagctgtgcggctactcgcgggccgaggtgatgcagcgaccctgcacctgcgacttcctgcacgggccgcgcacgcagcgccgcgctgccgcgcagatcgcgcaggcactgctgggcgccgaggagcgcaaagtggaaatcgccttctaccggaaagatgggagctgcttcctatgtctggtggatgtggtgcccgtgaagaacgaggatggggctgtcatcatgttcatcctcaatttcgaggtggtgatggagaaggacatggtggggtccccggctcatgacaccaaccaccggggcccccccaccagctggctggccccaggccgcgccaagaccttccgcctgaagctgcccgcgctgctggcgctgacggcccgggagtcgtcggtgcggtcgggcggcgcgggcggcgcgggcgccccgggggccgtggtggtggacgtggacctgacgcccgcggcacccagcagcgagtcgctggccctggacgaagtgacagccatggacaaccacgtggcagggctcgggcccgcggaggagcggcgtgcgctggtgggtcccggctctccgccccgcagcgcgcccggccagctcccatcgccccgggcgcacagcctcaaccccgacgcctcgggctccagctgcagcctggcccggacgcgctcccgagaaagctgcgccagcgtgcgccgcgcctcgtcggccgacgacatcgaggccatgcgcgccggggtgctgcccccgccaccgcgccacgccagcaccggggccatgcacccactgcgcagcggcttgctcaactccacctcggactccgacctcgtgcgctaccgcaccattagcaagattccccaaatcaccctcaactttgtggacctcaagggcgaccccttcttggcttcgcccaccagtgaccgtgagatcatagcacctaagataaaggagcgaacccacaatgtcactgagaaggtcacccaggtcctgtccctgggcgccgacgtgctgcctgagtacaagctgcaggcaccgcgcatccaccgctggaccatcctgcattacagccccttcaaggccgtgtgggactggctcatcctgctgctggtcatctacacggctgtcttcacaccctactcggctgccttcctgctgaaggagacggaagaaggcccgcctgctaccgagtgtggctacgcctgccagccgctggctgtggtggacctcatcgtggacatcatgttcattgtggacatcctcatcaacttccgcaccacctacgtcaatgccaacgaggaggtggtcagccaccccggccgcatcgccgtccactacttcaagggctggttcctcatcgacatggtggccgccatccccttcgacctgctcatcttcggctctggctctgaggagctgatcgggctgctgaagactgcgcggctgctgcggctggtgcgcgtggcgcggaagctggatcgctactcagagtacggcgcggccgtgctgttcttgctcatgtgcacctttgcgctcatcgcgcactggctagcctgcatctggtacgccatcggcaacatggagcagccacacatggactcacgcatcggctggctgcacaacctgggcgaccagataggcaaaccctacaacagcagcggcctgggcggcccctccatcaaggacaagtatgtgacggcgctctacttcaccttcagcagcctcaccagtgtgggcttcggcaacgtctctcccaacaccaactcagagaagatcttctccatctgcgtcatgctcattggctccctcatgtatgctagcatcttcggcaacgtgtcggccatcatccagcggctgtactcgggcacagcccgctaccacacacagatgctgcgggtgcgggagttcatccgcttccaccagatccccaatcccctgcgccagcgcctcgaggagtacttccagcacgcctggtcctacaccaacggcatcgacatgaacgcggtgctgaagggcttccctgagtgcctgcaggctgacatctgcctgcacctgaaccgctcactgctgcagcactgcaaacccttccgaggggccaccaagggctgccttcgggccctggccatgaagttcaagaccacacatgcaccgccaggggacacactggtgcatgctggggacctgctcaccgccctgtacttcatctcccggggctccatcgagatcctgcggggcgacgtcgtcgtggccatcctggggaagaatgacatctttggggagcctctgaacctgtatgcaaggcctggcaagtcgaacggggatgtgcgggccctcacctactgtgacctacacaagatccatcgggacgacctgctggaggtgctggacatgtaccctgagttctccgaccacttctggtccagcctggagatcaccttcaacctgcgagataccaacatgatcccgggctcccccggcagtacggagttagagggtggcttcagtcggcaacgcaagcgcaagttgtccttccgcaggcgcacggacaaggacacggagcagccaggggaggtgtcggccttggggccgggccgggcgggggcagggccgagtagccggggccggccgggggggccgtggggggagagcccgtccagtggcccctccagccctgagagcagtgaggatgagggcccaggccgcagctccagccccctccgcctggtgcccttctccagccccaggccccccggagagccgccgggtggggagcccctgatggaggactgcgagaagagcagcgacacttgcaaccccctgtcaggcgccttctcaggagtgtccaacattttcagcttctggggggacagtcggggccgccagtaccaggagctccctcgatgccccgcccccacccccagcctcctcaacatccccctctccagcccgggtcggcggccccggggcgacgtggagagcaggctggatgccctccagcgccagctcaacaggctggagacccggctgagtgcagacatggccactgtcctgcagctgctacggaggcagatgacgctggtcccgcccgcctacagtgctgtgaccaccccggggcctggccccacttccacatccccgctgttgcccgtcagccccctccccaccctcaccttggactcgctttctcaggtttcccagttcatggcgtgtgaggagctgcccccgggggccccagagcttccccaagaaggccccacacgacgcctctccctaccgggccagctgggggccctcacctcccagcccctgcacagacacggctcggacccgggcagttagtggggctgcccagtgtggacacgtggctcacccagggatcaaggcgctgctgggccgctccccttggaggccctgctcaggaggccctgaccgtggaaggggagaggaactcgaaagcacagctcctcccccagcccttgggaccatcttctcctgcagtcccctgggccccagtgagaggggcaggggcagggccggcagtaggtggggcctgtggtccccccactgccctgagggcattagctggtctaactgcccggaggcacccggccctgggccttaggcacctcaaggacttttctgctatttactgctcttattgttaaggataataattaaggatcatatgaataattaatgaagatgctgatgactatgaataataaataattatcctgaggaga

SEQ ID NO: 805 - DNA, 3884 bp, Homo sapiens
  source 1..3884: mol_type = genomic DNA
  misc_feature 1..3884: note = cDNA of KCNH2 gene SNP c.3209A>T (p.Gln1070Leu)
atgccggtgcggaggggccacgtcgcgccgcagaacaccttcctggacaccatcatccgcaagtttgagggccagagccgtaagttcatcatcgccaacgctcgggtggagaactgcgccgtcatctactgcaacgacggcttctgcgagctgtgcggctactcgcgggccgaggtgatgcagcgaccctgcacctgcgacttcctgcacgggccgcgcacgcagcgccgcgctgccgcgcagatcgcgcaggcactgctgggcgccgaggagcgcaaagtggaaatcgccttctaccggaaagatgggagctgcttcctatgtctggtggatgtggtgcccgtgaagaacgaggatggggctgtcatcatgttcatcctcaatttcgaggtggtgatggagaaggacatggtggggtccccggctcatgacaccaaccaccggggcccccccaccagctggctggccccaggccgcgccaagaccttccgcctgaagctgcccgcgctgctggcgctgacggcccgggagtcgtcggtgcggtcgggcggcgcgggcggcgcgggcgccccgggggccgtggtggtggacgtggacctgacgcccgcggcacccagcagcgagtcgctggccctggacgaagtgacagccatggacaaccacgtggcagggctcgggcccgcggaggagcggcgtgcgctggtgggtcccggctctccgccccgcagcgcgcccggccagctcccatcgccccgggcgcacagcctcaaccccgacgcctcgggctccagctgcagcctggcccggacgcgctcccgagaaagctgcgccagcgtgcgccgcgcctcgtcggccgacgacatcgaggccatgcgcgccggggtgctgcccccgccaccgcgccacgccagcaccggggccatgcacccactgcgcagcggcttgctcaactccacctcggactccgacctcgtgcgctaccgcaccattagcaagattccccaaatcaccctcaactttgtggacctcaagggcgaccccttcttggcttcgcccaccagtgaccgtgagatcatagcacctaagataaaggagcgaacccacaatgtcactgagaaggtcacccaggtcctgtccctgggcgccgacgtgctgcctgagtacaagctgcaggcaccgcgcatccaccgctggaccatcctgcattacagccccttcaaggccgtgtgggactggctcatcctgctgctggtcatctacacggctgtcttcacaccctactcggctgccttcctgctgaaggagacggaagaaggcccgcctgctaccgagtgtggctacgcctgccagccgctggctgtggtggacctcatcgtggacatcatgttcattgtggacatcctcatcaacttccgcaccacctacgtcaatgccaacgaggaggtggtcagccaccccggccgcatcgccgtccactacttcaagggctggttcctcatcgacatggtggccgccatccccttcgacctgctcatcttcggctctggctctgaggagctgatcgggctgctgaagactgcgcggctgctgcggctggtgcgcgtggcgcggaagctggatcgctactcagagtacggcgcggccgtgctgttcttgctcatgtgcacctttgcgctcatcgcgcactggctagcctgcatctggtacgccatcggcaacatggagcagccacacatggactcacgcatcggctggctgcacaacctgggcgaccagataggcaaaccctacaacagcagcggcctgggcggcccctccatcaaggacaagtatgtgacggcgctctacttcaccttcagcagcctcaccagtgtgggcttcggcaacgtctctcccaacaccaactcagagaagatcttctccatctgcgtcatgctcattggctccctcatgtatgctagcatcttcggcaacgtgtcggccatcatccagcggctgtactcgggcacagcccgctaccacacacagatgctgcgggtgcgggagttcatccgcttccaccagatccccaatcccctgcgccagcgcctcgaggagtacttccagcacgcctggtcctacaccaacggcatcgacatgaacgcggtgctgaagggcttccctgagtgcctgcaggctgacatctgcctgcacctgaaccgctcactgctgcagcactgcaaacccttccgaggggccaccaagggctgccttcgggccctggccatgaagttcaagaccacacatgcaccgccaggggacacactggtgcatgctggggacctgctcaccgccctgtacttcatctcccggggctccatcgagatcctgcggggcgacgtcgtcgtggccatcctggggaagaatgacatctttggggagcctctgaacctgtatgcaaggcctggcaagtcgaacggggatgtgcgggccctcacctactgtgacctacacaagatccatcgggacgacctgctggaggtgctggacatgtaccctgagttctccgaccacttctggtccagcctggagatcaccttcaacctgcgagataccaacatgatcccgggctcccccggcagtacggagttagagggtggcttcagtcggcaacgcaagcgcaagttgtccttccgcaggcgcacggacaaggacacggagcagccaggggaggtgtcggccttggggccgggccgggcgggggcagggccgagtagccggggccggccgggggggccgtggggggagagcccgtccagtggcccctccagccctgagagcagtgaggatgagggcccaggccgcagctccagccccctccgcctggtgcccttctccagccccaggccccccggagagccgccgggtggggagcccctgatggaggactgcgagaagagcagcgacacttgcaaccccctgtcaggcgccttctcaggagtgtccaacattttcagcttctggggggacagtcggggccgccagtaccaggagctccctcgatgccccgcccccacccccagcctcctcaacatccccctctccagcccgggtcggcggccccggggcgacgtggagagcaggctggatgccctccagcgccagctcaacaggctggagacccggctgagtgcagacatggccactgtcctgcagctgctacagaggctgatgacgctggtcccgcccgcctacagtgctgtgaccaccccggggcctggccccacttccacatccccgctgttgcccgtcagccccctccccaccctcaccttggactcgctttctcaggtttcccagttcatggcgtgtgaggagctgcccccgggggccccagagcttccccaagaaggccccacacgacgcctctccctaccgggccagctgggggccctcacctcccagcccctgcacagacacggctcggacccgggcagttagtggggctgcccagtgtggacacgtggctcacccagggatcaaggcgctgctgggccgctccccttggaggccctgctcaggaggccctgaccgtggaaggggagaggaactcgaaagcacagctcctcccccagcccttgggaccatcttctcctgcagtcccctgggccccagtgagaggggcaggggcagggccggcagtaggtggggcctgtggtccccccactgccctgagggcattagctggtctaactgcccggaggcacccggccctgggccttaggcacctcaaggacttttctgctatttactgctcttattgttaaggataataattaaggatcatatgaataattaatgaagatgctgatgactatgaataataaataattatcctgaggaga

SEQ ID NO: 806 - DNA, 3884 bp, Homo sapiens
  source 1..3884: mol_type = genomic DNA
  misc_feature 1..3884: note = cDNA of KCNH2 gene SNP c.3211A>G (p.Met1071Val)
atgccggtgcggaggggccacgtcgcgccgcagaacaccttcctggacaccatcatccgcaagtttgagggccagagccgtaagttcatcatcgccaacgctcgggtggagaactgcgccgtcatctactgcaacgacggcttctgcgagctgtgcggctactcgcgggccgaggtgatgcagcgaccctgcacctgcgacttcctgcacgggccgcgcacgcagcgccgcgctgccgcgcagatcgcgcaggcactgctgggcgccgaggagcgcaaagtggaaatcgccttctaccggaaagatgggagctgcttcctatgtctggtggatgtggtgcccgtgaagaacgaggatggggctgtcatcatgttcatcctcaatttcgaggtggtgatggagaaggacatggtggggtccccggctcatgacaccaaccaccggggcccccccaccagctggctggccccaggccgcgccaagaccttccgcctgaagctgcccgcgctgctggcgctgacggcccgggagtcgtcggtgcggtcgggcggcgcgggcggcgcgggcgccccgggggccgtggtggtggacgtggacctgacgcccgcggcacccagcagcgagtcgctggccctggacgaagtgacagccatggacaaccacgtggcagggctcgggcccgcggaggagcggcgtgcgctggtgggtcccggctctccgccccgcagcgcgcccggccagctcccatcgccccgggcgcacagcctcaaccccgacgcctcgggctccagctgcagcctggcccggacgcgctcccgagaaagctgcgccagcgtgcgccgcgcctcgtcggccgacgacatcgaggccatgcgcgccggggtgctgcccccgccaccgcgccacgccagcaccggggccatgcacccactgcgcagcggcttgctcaactccacctcggactccgacctcgtgcgctaccgcaccattagcaagattccccaaatcaccctcaactttgtggacctcaagggcgaccccttcttggcttcgcccaccagtgaccgtgagatcatagcacctaagataaaggagcgaacccacaatgtcactgagaaggtcacccaggtcctgtccctgggcgccgacgtgctgcctgagtacaagctgcaggcaccgcgcatccaccgctggaccatcctgcattacagccccttcaaggccgtgtgggactggctcatcctgctgctggtcatctacacggctgtcttcacaccctactcggctgccttcctgctgaaggagacggaagaaggcccgcctgctaccgagtgtggctacgcctgccagccgctggctgtggtggacctcatcgtggacatcatgttcattgtggacatcctcatcaacttccgcaccacctacgtcaatgccaacgaggaggtggtcagccaccccggccgcatcgccgtccactacttcaagggctggttcctcatcgacatggtggccgccatccccttcgacctgctcatcttcggctctggctctgaggagctgatcgggctgctgaagactgcgcggctgctgcggctggtgcgcgtggcgcggaagctggatcgctactcagagtacggcgcggccgtgctgttcttgctcatgtgcacctttgcgctcatcgcgcactggctagcctgcatctggtacgccatcggcaacatggagcagccacacatggactcacgcatcggctggctgcacaacctgggcgaccagataggcaaaccctacaacagcagcggcctgggcggcccctccatcaaggacaagtatgtgacggcgctctacttcaccttcagcagcctcaccagtgtgggcttcggcaacgtctctcccaacaccaactcagagaagatcttctccatctgcgtcatgctcattggctccctcatgtatgctagcatcttcggcaacgtgtcggccatcatccagcggctgtactcgggcacagcccgctaccacacacagatgctgcgggtgcgggagttcatccgcttccaccagatccccaatcccctgcgccagcgcctcgaggagtacttccagcacgcctggtcctacaccaacggcatcgacatgaacgcggtgctgaagggcttccctgagtgcctgcaggctgacatctgcctgcacctgaaccgctcactgctgcagcactgcaaacccttccgaggggccaccaagggctgccttcgggccctggccatgaagttcaagaccacacatgcaccgccaggggacacactggtgcatgctggggacctgctcaccgccctgtacttcatctcccggggctccatcgagatcctgcggggcgacgtcgtcgtggccatcctggggaagaatgacatctttggggagcctctgaacctgtatgcaaggcctggcaagtcgaacggggatgtgcgggccctcacctactgtgacctacacaagatccatcgggacgacctgctggaggtgctggacatgtaccctgagttctccgaccacttctggtccagcctggagatcaccttcaacctgcgagataccaacatgatcccgggctcccccggcagtacggagttagagggtggcttcagtcggcaacgcaagcgcaagttgtccttccgcaggcgcacggacaaggacacggagcagccaggggaggtgtcggccttggggccgggccgggcgggggcagggccgagtagccggggccggccgggggggccgtggggggagagcccgtccagtggcccctccagccctgagagcagtgaggatgagggcccaggccgcagctccagccccctccgcctggtgcccttctccagccccaggccccccggagagccgccgggtggggagcccctgatggaggactgcgagaagagcagcgacacttgcaaccccctgtcaggcgccttctcaggagtgtccaacattttcagcttctggggggacagtcggggccgccagtaccaggagctccctcgatgccccgcccccacccccagcctcctcaacatccccctctccagcccgggtcggcggccccggggcgacgtggagagcaggctggatgccctccagcgccagctcaacaggctggagacccggctgagtgcagacatggccactgtcctgcagctgctacagaggcaggtgacgctggtcccgcccgcctacagtgctgtgaccaccccggggcctggccccacttccacatccccgctgttgcccgtcagccccctccccaccctcaccttggactcgctttctcaggtttcccagttcatggcgtgtgaggagctgcccccgggggccccagagcttccccaagaaggccccacacgacgcctctccctaccgggccagctgggggccctcacctcccagcccctgcacagacacggctcggacccgggcagttagtggggctgcccagtgtggacacgtggctcacccagggatcaaggcgctgctgggccgctccccttggaggccctgctcaggaggccctgaccgtggaaggggagaggaactcgaaagcacagctcctcccccagcccttgggaccatcttctcctgcagtcccctgggccccagtgagaggggcaggggcagggccggcagtaggtggggcctgtggtccccccactgccctgagggcattagctggtctaactgcccggaggcacccggccctgggccttaggcacctcaaggacttttctgctatttactgctcttattgttaaggataataattaaggatcatatgaataattaatgaagatgctgatgactatgaataataaataattatcctgaggaga

SEQ ID NO: 807 - DNA, 3884 bp, Homo sapiens
  source 1..3884: mol_type = genomic DNA
  misc_feature 1..3884: note = cDNA of KCNH2 gene SNP c.3215C>T (p.Thr1072Met)
atgccggtgcggaggggccacgtcgcgccgcagaacaccttcctggacaccatcatccgcaagtttgagggccagagccgtaagttcatcatcgccaacgctcgggtggagaactgcgccgtcatctactgcaacgacggcttctgcgagctgtgcggctactcgcgggccgaggtgatgcagcgaccctgcacctgcgacttcctgcacgggccgcgcacgcagcgccgcgctgccgcgcagatcgcgcaggcactgctgggcgccgaggagcgcaaagtggaaatcgccttctaccggaaagatgggagctgcttcctatgtctggtggatgtggtgcccgtgaagaacgaggatggggctgtcatcatgttcatcctcaatttcgaggtggtgatggagaaggacatggtggggtccccggctcatgacaccaaccaccggggcccccccaccagctggctggccccaggccgcgccaagaccttccgcctgaagctgcccgcgctgctggcgctgacggcccgggagtcgtcggtgcggtcgggcggcgcgggcggcgcgggcgccccgggggccgtggtggtggacgtggacctgacgcccgcggcacccagcagcgagtcgctggccctggacgaagtgacagccatggacaaccacgtggcagggctcgggcccgcggaggagcggcgtgcgctggtgggtcccggctctccgccccgcagcgcgcccggccagctcccatcgccccgggcgcacagcctcaaccccgacgcctcgggctccagctgcagcctggcccggacgcgctcccgagaaagctgcgccagcgtgcgccgcgcctcgtcggccgacgacatcgaggccatgcgcgccggggtgctgcccccgccaccgcgccacgccagcaccggggccatgcacccactgcgcagcggcttgctcaactccacctcggactccgacctcgtgcgctaccgcaccattagcaagattccccaaatcaccctcaactttgtggacctcaagggcgaccccttcttggcttcgcccaccagtgaccgtgagatcatagcacctaagataaaggagcgaacccacaatgtcactgagaaggtcacccaggtcctgtccctgggcgccgacgtgctgcctgagtacaagctgcaggcaccgcgcatccaccgctggaccatcctgcattacagccccttcaaggccgtgtgggactggctcatcctgctgctggtcatctacacggctgtcttcacaccctactcggctgccttcctgctgaaggagacggaagaaggcccgcctgctaccgagtgtggctacgcctgccagccgctggctgtggtggacctcatcgtggacatcatgttcattgtggacatcctcatcaacttccgcaccacctacgtcaatgccaacgaggaggtggtcagccaccccggccgcatcgccgtccactacttcaagggctggttcctcatcgacatggtggccgccatccccttcgacctgctcatcttcggctctggctctgaggagctgatcgggctgctgaagactgcgcggctgctgcggctggtgcgcgtggcgcggaagctggatcgctactcagagtacggcgcggccgtgctgttcttgctcatgtgcacctttgcgctcatcgcgcactggctagcctgcatctggtacgccatcggcaacatggagcagccacacatggactcacgcatcggctggctgcacaacctgggcgaccagataggcaaaccctacaacagcagcggcctgggcggcccctccatcaaggacaagtatgtgacggcgctctacttcaccttcagcagcctcaccagtgtgggcttcggcaacgtctctcccaacaccaactcagagaagatcttctccatctgcgtcatgctcattggctccctcatgtatgctagcatcttcggcaacgtgtcggccatcatccagcggctgtactcgggcacagcccgctaccacacacagatgctgcgggtgcgggagttcatccgcttccaccagatccccaatcccctgcgccagcgcctcgaggagtacttccagcacgcctggtcctacaccaacggcatcgacatgaacgcggtgctgaagggcttccctgagtgcctgcaggctgacatctgcctgcacctgaaccgctcactgctgcagcactgcaaacccttccgaggggccaccaagggctgccttcgggccctggccatgaagttcaagaccacacatgcaccgccaggggacacactggtgcatgctggggacctgctcaccgccctgtacttcatctcccggggctccatcgagatcctgcggggcgacgtcgtcgtggccatcctggggaagaatgacatctttggggagcctctgaacctgtatgcaaggcctggcaagtcgaacggggatgtgcgggccctcacctactgtgacctacacaagatccatcgggacgacctgctggaggtgctggacatgtaccctgagttctccgaccacttctggtccagcctggagatcaccttcaacctgcgagataccaacatgatcccgggctcccccggcagtacggagttagagggtggcttcagtcggcaacgcaagcgcaagttgtccttccgcaggcgcacggacaaggacacggagcagccaggggaggtgtcggccttggggccgggccgggcgggggcagggccgagtagccggggccggccgggggggccgtggggggagagcccgtccagtggcccctccagccctgagagcagtgaggatgagggcccaggccgcagctccagccccctccgcctggtgcccttctccagccccaggccccccggagagccgccgggtggggagcccctgatggaggactgcgagaagagcagcgacacttgcaaccccctgtcaggcgccttctcaggagtgtccaacattttcagcttctggggggacagtcggggccgccagtaccaggagctccctcgatgccccgcccccacccccagcctcctcaacatccccctctccagcccgggtcggcggccccggggcgacgtggagagcaggctggatgccctccagcgccagctcaacaggctggagacccggctgagtgcagacatggccactgtcctgcagctgctacagaggcagatgatgctggtcccgcccgcctacagtgctgtgaccaccccggggcctggccccacttccacatccccgctgttgcccgtcagccccctccccaccctcaccttggactcgctttctcaggtttcccagttcatggcgtgtgaggagctgcccccgggggccccagagcttccccaagaaggccccacacgacgcctctccctaccgggccagctgggggccctcacctcccagcccctgcacagacacggctcggacccgggcagttagtggggctgcccagtgtggacacgtggctcacccagggatcaaggcgctgctgggccgctccccttggaggccctgctcaggaggccctgaccgtggaaggggagaggaactcgaaagcacagctcctcccccagcccttgggaccatcttctcctgcagtcccctgggccccagtgagaggggcaggggcagggccggcagtaggtggggcctgtggtccccccactgccctgagggcattagctggtctaactgcccggaggcacccggccctgggccttaggcacctcaaggacttttctgctatttactgctcttattgttaaggataataattaaggatcatatgaataattaatgaagatgctgatgactatgaataataaataattatcctgaggaga

SEQ ID NO: 808 - DNA, 3884 bp, Homo sapiens
  source 1..3884: mol_type = genomic DNA
  misc_feature 1..3884: note = cDNA of KCNH2 gene SNP c.3224C>A (p.Pro1075Gln)
atgccggtgcggaggggccacgtcgcgccgcagaacaccttcctggacaccatcatccgcaagtttgagggccagagccgtaagttcatcatcgccaacgctcgggtggagaactgcgccgtcatctactgcaacgacggcttctgcgagctgtgcggctactcgcgggccgaggtgatgcagcgaccctgcacctgcgacttcctgcacgggccgcgcacgcagcgccgcgctgccgcgcagatcgcgcaggcactgctgggcgccgaggagcgcaaagtggaaatcgccttctaccggaaagatgggagctgcttcctatgtctggtggatgtggtgcccgtgaagaacgaggatggggctgtcatcatgttcatcctcaatttcgaggtggtgatggagaaggacatggtggggtccccggctcatgacaccaaccaccggggcccccccaccagctggctggccccaggccgcgccaagaccttccgcctgaagctgcccgcgctgctggcgctgacggcccgggagtcgtcggtgcggtcgggcggcgcgggcggcgcgggcgccccgggggccgtggtggtggacgtggacctgacgcccgcggcacccagcagcgagtcgctggccctggacgaagtgacagccatggacaaccacgtggcagggctcgggcccgcggaggagcggcgtgcgctggtgggtcccggctctccgccccgcagcgcgcccggccagctcccatcgccccgggcgcacagcctcaaccccgacgcctcgggctccagctgcagcctggcccggacgcgctcccgagaaagctgcgccagcgtgcgccgcgcctcgtcggccgacgacatcgaggccatgcgcgccggggtgctgcccccgccaccgcgccacgccagcaccggggccatgcacccactgcgcagcggcttgctcaactccacctcggactccgacctcgtgcgctaccgcaccattagcaagattccccaaatcaccctcaactttgtggacctcaagggcgaccccttcttggcttcgcccaccagtgaccgtgagatcatagcacctaagataaaggagcgaacccacaatgtcactgagaaggtcacccaggtcctgtccctgggcgccgacgtgctgcctgagtacaagctgcaggcaccgcgcatccaccgctggaccatcctgcattacagccccttcaaggccgtgtgggactggctcatcctgctgctggtcatctacacggctgtcttcacaccctactcggctgccttcctgctgaaggagacggaagaaggcccgcctgctaccgagtgtggctacgcctgccagccgctggctgtggtggacctcatcgtggacatcatgttcattgtggacatcctcatcaacttccgcaccacctacgtcaatgccaacgaggaggtggtcagccaccccggccgcatcgccgtccactacttcaagggctggttcctcatcgacatggtggccgccatccccttcgacctgctcatcttcggctctggctctgaggagctgatcgggctgctgaagactgcgcggctgctgcggctggtgcgcgtggcgcggaagctggatcgctactcagagtacggcgcggccgtgctgttcttgctcatgtgcacctttgcgctcatcgcgcactggctagcctgcatctggtacgccatcggcaacatggagcagccacacatggactcacgcatcggctggctgcacaacctgggcgaccagataggcaaaccctacaacagcagcggcctgggcggcccctccatcaaggacaagtatgtgacggcgctctacttcaccttcagcagcctcaccagtgtgggcttcggcaacgtctctcccaacaccaactcagagaagatcttctccatctgcgtcatgctcattggctccctcatgtatgctagcatcttcggcaacgtgtcggccatcatccagcggctgtactcgggcacagcccgctaccacacacagatgctgcgggtgcgggagttcatccgcttccaccagatccccaatcccctgcgccagcgcctcgaggagtacttccagcacgcctggtcctacaccaacggcatcgacatgaacgcggtgctgaagggcttccctgagtgcctgcaggctgacatctgcctgcacctgaaccgctcactgctgcagcactgcaaacccttccgaggggccaccaagggctgccttcgggccctggccatgaagttcaagaccacacatgcaccgccaggggacacactggtgcatgctggggacctgctcaccgccctgtacttcatctcccggggctccatcgagatcctgcggggcgacgtcgtcgtggccatcctggggaagaatgacatctttggggagcctctgaacctgtatgcaaggcctggcaagtcgaacggggatgtgcgggccctcacctactgtgacctacacaagatccatcgggacgacctgctggaggtgctggacatgtaccctgagttctccgaccacttctggtccagcctggagatcaccttcaacctgcgagataccaacatgatcccgggctcccccggcagtacggagttagagggtggcttcagtcggcaacgcaagcgcaagttgtccttccgcaggcgcacggacaaggacacggagcagccaggggaggtgtcggccttggggccgggccgggcgggggcagggccgagtagccggggccggccgggggggccgtggggggagagcccgtccagtggcccctccagccctgagagcagtgaggatgagggcccaggccgcagctccagccccctccgcctggtgcccttctccagccccaggccccccggagagccgccgggtggggagcccctgatggaggactgcgagaagagcagcgacacttgcaaccccctgtcaggcgccttctcaggagtgtccaacattttcagcttctggggggacagtcggggccgccagtaccaggagctccctcgatgccccgcccccacccccagcctcctcaacatccccctctccagcccgggtcggcggccccggggcgacgtggagagcaggctggatgccctccagcgccagctcaacaggctggagacccggctgagtgcagacatggccactgtcctgcagctgctacagaggcagatgacgctggtccagcccgcctacagtgctgtgaccaccccggggcctggccccacttccacatccccgctgttgcccgtcagccccctccccaccctcaccttggactcgctttctcaggtttcccagttcatggcgtgtgaggagctgcccccgggggccccagagcttccccaagaaggccccacacgacgcctctccctaccgggccagctgggggccctcacctcccagcccctgcacagacacggctcggacccgggcagttagtggggctgcccagtgtggacacgtggctcacccagggatcaaggcgctgctgggccgctccccttggaggccctgctcaggaggccctgaccgtggaaggggagaggaactcgaaagcacagctcctcccccagcccttgggaccatcttctcctgcagtcccctgggccccagtgagaggggcaggggcagggccggcagtaggtggggcctgtggtccccccactgccctgagggcattagctggtctaactgcccggaggcacccggccctgggccttaggcacctcaaggacttttctgctatttactgctcttattgttaaggataataattaaggatcatatgaataattaatgaagatgctgatgactatgaataataaataattatcctgaggaga

SEQ ID NO: 809 - DNA, 3884 bp, Homo sapiens
  source 1..3884: mol_type = genomic DNA
  misc_feature 1..3884: note = cDNA of KCNH2 gene SNP c.3224C>T (p.Pro1075Leu)
atgccggtgcggaggggccacgtcgcgccgcagaacaccttcctggacaccatcatccgcaagtttgagggccagagccgtaagttcatcatcgccaacgctcgggtggagaactgcgccgtcatctactgcaacgacggcttctgcgagctgtgcggctactcgcgggccgaggtgatgcagcgaccctgcacctgcgacttcctgcacgggccgcgcacgcagcgccgcgctgccgcgcagatcgcgcaggcactgctgggcgccgaggagcgcaaagtggaaatcgccttctaccggaaagatgggagctgcttcctatgtctggtggatgtggtgcccgtgaagaacgaggatggggctgtcatcatgttcatcctcaatttcgaggtggtgatggagaaggacatggtggggtccccggctcatgacaccaaccaccggggcccccccaccagctggctggccccaggccgcgccaagaccttccgcctgaagctgcccgcgctgctggcgctgacggcccgggagtcgtcggtgcggtcgggcggcgcgggcggcgcgggcgccccgggggccgtggtggtggacgtggacctgacgcccgcggcacccagcagcgagtcgctggccctggacgaagtgacagccatggacaaccacgtggcagggctcgggcccgcggaggagcggcgtgcgctggtgggtcccggctctccgccccgcagcgcgcccggccagctcccatcgccccgggcgcacagcctcaaccccgacgcctcgggctccagctgcagcctggcccggacgcgctcccgagaaagctgcgccagcgtgcgccgcgcctcgtcggccgacgacatcgaggccatgcgcgccggggtgctgcccccgccaccgcgccacgccagcaccggggccatgcacccactgcgcagcggcttgctcaactccacctcggactccgacctcgtgcgctaccgcaccattagcaagattccccaaatcaccctcaactttgtggacctcaagggcgaccccttcttggcttcgcccaccagtgaccgtgagatcatagcacctaagataaaggagcgaacccacaatgtcactgagaaggtcacccaggtcctgtccctgggcgccgacgtgctgcctgagtacaagctgcaggcaccgcgcatccaccgctggaccatcctgcattacagccccttcaaggccgtgtgggactggctcatcctgctgctggtcatctacacggctgtcttcacaccctactcggctgccttcctgctgaaggagacggaagaaggcccgcctgctaccgagtgtggctacgcctgccagccgctggctgtggtggacctcatcgtggacatcatgttcattgtggacatcctcatcaacttccgcaccacctacgtcaatgccaacgaggaggtggtcagccaccccggccgcatcgccgtccactacttcaagggctggttcctcatcgacatggtggccgccatccccttcgacctgctcatcttcggctctggctctgaggagctgatcgggctgctgaagactgcgcggctgctgcggctggtgcgcgtggcgcggaagctggatcgctactcagagtacggcgcggccgtgctgttcttgctcatgtgcacctttgcgctcatcgcgcactggctagcctgcatctggtacgccatcggcaacatggagcagccacacatggactcacgcatcggctggctgcacaacctgggcgaccagataggcaaaccctacaacagcagcggcctgggcggcccctccatcaaggacaagtatgtgacggcgctctacttcaccttcagcagcctcaccagtgtgggcttcggcaacgtctctcccaacaccaactcagagaagatcttctccatctgcgtcatgctcattggctccctcatgtatgctagcatcttcggcaacgtgtcggccatcatccagcggctgtactcgggcacagcccgctaccacacacagatgctgcgggtgcgggagttcatccgcttccaccagatccccaatcccctgcgccagcgcctcgaggagtacttccagcacgcctggtcctacaccaacggcatcgacatgaacgcggtgctgaagggcttccctgagtgcctgcaggctgacatctgcctgcacctgaaccgctcactgctgcagcactgcaaacccttccgaggggccaccaagggctgccttcgggccctggccatgaagttcaagaccacacatgcaccgccaggggacacactggtgcatgctggggacctgctcaccgccctgtacttcatctcccggggctccatcgagatcctgcggggcgacgtcgtcgtggccatcctggggaagaatgacatctttggggagcctctgaacctgtatgcaaggcctggcaagtcgaacggggatgtgcgggccctcacctactgtgacctacacaagatccatcgggacgacctgctggaggtgctggacatgtaccctgagttctccgaccacttctggtccagcctggagatcaccttcaacctgcgagataccaacatgatcccgggctcccccggcagtacggagttagagggtggcttcagtcggcaacgcaagcgcaagttgtccttccgcaggcgcacggacaaggacacggagcagccaggggaggtgtcggccttggggccgggccgggcgggggcagggccgagtagccggggccggccgggggggccgtggggggagagcccgtccagtggcccctccagccctgagagcagtgaggatgagggcccaggccgcagctccagccccctccgcctggtgcccttctccagccccaggccccccggagagccgccgggtggggagcccctgatggaggactgcgagaagagcagcgacacttgcaaccccctgtcaggcgccttctcaggagtgtccaacattttcagcttctggggggacagtcggggccgccagtaccaggagctccctcgatgccccgcccccacccccagcctcctcaacatccccctctccagcccgggtcggcggccccggggcgacgtggagagcaggctggatgccctccagcgccagctcaacaggctggagacccggctgagtgcagacatggccactgtcctgcagctgctacagaggcagatgacgctggtcctgcccgcctacagtgctgtgaccaccccggggcctggccccacttccacatccccgctgttgcccgtcagccccctccccaccctcaccttggactcgctttctcaggtttcccagttcatggcgtgtgaggagctgcccccgggggccccagagcttccccaagaaggccccacacgacgcctctccctaccgggccagctgggggccctcacctcccagcccctgcacagacacggctcggacccgggcagttagtggggctgcccagtgtggacacgtggctcacccagggatcaaggcgctgctgggccgctccccttggaggccctgctcaggaggccctgaccgtggaaggggagaggaactcgaaagcacagctcctcccccagcccttgggaccatcttctcctgcagtcccctgggccccagtgagaggggcaggggcagggccggcagtaggtggggcctgtggtccccccactgccctgagggcattagctggtctaactgcccggaggcacccggccctgggccttaggcacctcaaggacttttctgctatttactgctcttattgttaaggataataattaaggatcatatgaataattaatgaagatgctgatgactatgaataataaataattatcctgaggaga

SEQ ID NO: 810 - DNA, 3884 bp, Homo sapiens
  source 1..3884: mol_type = genomic DNA
  misc_feature 1..3884: note = cDNA of KCNH2 gene SNP c.3229G>A (p.Ala1077Thr)
atgccggtgcggaggggccacgtcgcgccgcagaacaccttcctggacaccatcatccgcaagtttgagggccagagccgtaagttcatcatcgccaacgctcgggtggagaactgcgccgtcatctactgcaacgacggcttctgcgagctgtgcggctactcgcgggccgaggtgatgcagcgaccctgcacctgcgacttcctgcacgggccgcgcacgcagcgccgcgctgccgcgcagatcgcgcaggcactgctgggcgccgaggagcgcaaagtggaaatcgccttctaccggaaagatgggagctgcttcctatgtctggtggatgtggtgcccgtgaagaacgaggatggggctgtcatcatgttcatcctcaatttcgaggtggtgatggagaaggacatggtggggtccccggctcatgacaccaaccaccggggcccccccaccagctggctggccccaggccgcgccaagaccttccgcctgaagctgcccgcgctgctggcgctgacggcccgggagtcgtcggtgcggtcgggcggcgcgggcggcgcgggcgccccgggggccgtggtggtggacgtggacctgacgcccgcggcacccagcagcgagtcgctggccctggacgaagtgacagccatggacaaccacgtggcagggctcgggcccgcggaggagcggcgtgcgctggtgggtcccggctctccgccccgcagcgcgcccggccagctcccatcgccccgggcgcacagcctcaaccccgacgcctcgggctccagctgcagcctggcccggacgcgctcccgagaaagctgcgccagcgtgcgccgcgcctcgtcggccgacgacatcgaggccatgcgcgccggggtgctgcccccgccaccgcgccacgccagcaccggggccatgcacccactgcgcagcggcttgctcaactccacctcggactccgacctcgtgcgctaccgcaccattagcaagattccccaaatcaccctcaactttgtggacctcaagggcgaccccttcttggcttcgcccaccagtgaccgtgagatcatagcacctaagataaaggagcgaacccacaatgtcactgagaaggtcacccaggtcctgtccctgggcgccgacgtgctgcctgagtacaagctgcaggcaccgcgcatccaccgctggaccatcctgcattacagccccttcaaggccgtgtgggactggctcatcctgctgctggtcatctacacggctgtcttcacaccctactcggctgccttcctgctgaaggagacggaagaaggcccgcctgctaccgagtgtggctacgcctgccagccgctggctgtggtggacctcatcgtggacatcatgttcattgtggacatcctcatcaacttccgcaccacctacgtcaatgccaacgaggaggtggtcagccaccccggccgcatcgccgtccactacttcaagggctggttcctcatcgacatggtggccgccatccccttcgacctgctcatcttcggctctggctctgaggagctgatcgggctgctgaagactgcgcggctgctgcggctggtgcgcgtggcgcggaagctggatcgctactcagagtacggcgcggccgtgctgttcttgctcatgtgcacctttgcgctcatcgcgcactggctagcctgcatctggtacgccatcggcaacatggagcagccacacatggactcacgcatcggctggctgcacaacctgggcgaccagataggcaaaccctacaacagcagcggcctgggcggcccctccatcaaggacaagtatgtgacggcgctctacttcaccttcagcagcctcaccagtgtgggcttcggcaacgtctctcccaacaccaactcagagaagatcttctccatctgcgtcatgctcattggctccctcatgtatgctagcatcttcggcaacgtgtcggccatcatccagcggctgtactcgggcacagcccgctaccacacacagatgctgcgggtgcgggagttcatccgcttccaccagatccccaatcccctgcgccagcgcctcgaggagtacttccagcacgcctggtcctacaccaacggcatcgacatgaacgcggtgctgaagggcttccctgagtgcctgcaggctgacatctgcctgcacctgaaccgctcactgctgcagcactgcaaacccttccgaggggccaccaagggctgccttcgggccctggccatgaagttcaagaccacacatgcaccgccaggggacacactggtgcatgctggggacctgctcaccgccctgtacttcatctcccggggctccatcgagatcctgcggggcgacgtcgtcgtggccatcctggggaagaatgacatctttggggagcctctgaacctgtatgcaaggcctggcaagtcgaacggggatgtgcgggccctcacctactgtgacctacacaagatccatcgggacgacctgctggaggtgctggacatgtaccctgagttctccgaccacttctggtccagcctggagatcaccttcaacctgcgagataccaacatgatcccgggctcccccggcagtacggagttagagggtggcttcagtcggcaacgcaagcgcaagttgtccttccgcaggcgcacggacaaggacacggagcagccaggggaggtgtcggccttggggccgggccgggcgggggcagggccgagtagccggggccggccgggggggccgtggggggagagcccgtccagtggcccctccagccctgagagcagtgaggatgagggcccaggccgcagctccagccccctccgcctggtgcccttctccagccccaggccccccggagagccgccgggtggggagcccctgatggaggactgcgagaagagcagcgacacttgcaaccccctgtcaggcgccttctcaggagtgtccaacattttcagcttctggggggacagtcggggccgccagtaccaggagctccctcgatgccccgcccccacccccagcctcctcaacatccccctctccagcccgggtcggcggccccggggcgacgtggagagcaggctggatgccctccagcgccagctcaacaggctggagacccggctgagtgcagacatggccactgtcctgcagctgctacagaggcagatgacgctggtcccgcccacctacagtgctgtgaccaccccggggcctggccccacttccacatccccgctgttgcccgtcagccccctccccaccctcaccttggactcgctttctcaggtttcccagttcatggcgtgtgaggagctgcccccgggggccccagagcttccccaagaaggccccacacgacgcctctccctaccgggccagctgggggccctcacctcccagcccctgcacagacacggctcggacccgggcagttagtggggctgcccagtgtggacacgtggctcacccagggatcaaggcgctgctgggccgctccccttggaggccctgctcaggaggccctgaccgtggaaggggagaggaactcgaaagcacagctcctcccccagcccttgggaccatcttctcctgcagtcccctgggccccagtgagaggggcaggggcagggccggcagtaggtggggcctgtggtccccccactgccctgagggcattagctggtctaactgcccggaggcacccggccctgggccttaggcacctcaaggacttttctgctatttactgctcttattgttaaggataataattaaggatcatatgaataattaatgaagatgctgatgactatgaataataaataattatcctgaggaga

SEQ ID NO: 811 - DNA, 3884 bp, Homo sapiens
  source 1..3884: mol_type = genomic DNA
  misc_feature 1..3884: note = cDNA of KCNH2 gene SNP c.322T>C (p.Cys108Arg)
atgccggtgcggaggggccacgtcgcgccgcagaacaccttcctggacaccatcatccgcaagtttgagggccagagccgtaagttcatcatcgccaacgctcgggtggagaactgcgccgtcatctactgcaacgacggcttctgcgagctgtgcggctactcgcgggccgaggtgatgcagcgaccctgcacctgcgacttcctgcacgggccgcgcacgcagcgccgcgctgccgcgcagatcgcgcaggcactgctgggcgccgaggagcgcaaagtggaaatcgccttctaccggaaagatgggagctgcttcctacgtctggtggatgtggtgcccgtgaagaacgaggatggggctgtcatcatgttcatcctcaatttcgaggtggtgatggagaaggacatggtggggtccccggctcatgacaccaaccaccggggcccccccaccagctggctggccccaggccgcgccaagaccttccgcctgaagctgcccgcgctgctggcgctgacggcccgggagtcgtcggtgcggtcgggcggcgcgggcggcgcgggcgccccgggggccgtggtggtggacgtggacctgacgcccgcggcacccagcagcgagtcgctggccctggacgaagtgacagccatggacaaccacgtggcagggctcgggcccgcggaggagcggcgtgcgctggtgggtcccggctctccgccccgcagcgcgcccggccagctcccatcgccccgggcgcacagcctcaaccccgacgcctcgggctccagctgcagcctggcccggacgcgctcccgagaaagctgcgccagcgtgcgccgcgcctcgtcggccgacgacatcgaggccatgcgcgccggggtgctgcccccgccaccgcgccacgccagcaccggggccatgcacccactgcgcagcggcttgctcaactccacctcggactccgacctcgtgcgctaccgcaccattagcaagattccccaaatcaccctcaactttgtggacctcaagggcgaccccttcttggcttcgcccaccagtgaccgtgagatcatagcacctaagataaaggagcgaacccacaatgtcactgagaaggtcacccaggtcctgtccctgggcgccgacgtgctgcctgagtacaagctgcaggcaccgcgcatccaccgctggaccatcctgcattacagccccttcaaggccgtgtgggactggctcatcctgctgctggtcatctacacggctgtcttcacaccctactcggctgccttcctgctgaaggagacggaagaaggcccgcctgctaccgagtgtggctacgcctgccagccgctggctgtggtggacctcatcgtggacatcatgttcattgtggacatcctcatcaacttccgcaccacctacgtcaatgccaacgaggaggtggtcagccaccccggccgcatcgccgtccactacttcaagggctggttcctcatcgacatggtggccgccatccccttcgacctgctcatcttcggctctggctctgaggagctgatcgggctgctgaagactgcgcggctgctgcggctggtgcgcgtggcgcggaagctggatcgctactcagagtacggcgcggccgtgctgttcttgctcatgtgcacctttgcgctcatcgcgcactggctagcctgcatctggtacgccatcggcaacatggagcagccacacatggactcacgcatcggctggctgcacaacctgggcgaccagataggcaaaccctacaacagcagcggcctgggcggcccctccatcaaggacaagtatgtgacggcgctctacttcaccttcagcagcctcaccagtgtgggcttcggcaacgtctctcccaacaccaactcagagaagatcttctccatctgcgtcatgctcattggctccctcatgtatgctagcatcttcggcaacgtgtcggccatcatccagcggctgtactcgggcacagcccgctaccacacacagatgctgcgggtgcgggagttcatccgcttccaccagatccccaatcccctgcgccagcgcctcgaggagtacttccagcacgcctggtcctacaccaacggcatcgacatgaacgcggtgctgaagggcttccctgagtgcctgcaggctgacatctgcctgcacctgaaccgctcactgctgcagcactgcaaacccttccgaggggccaccaagggctgccttcgggccctggccatgaagttcaagaccacacatgcaccgccaggggacacactggtgcatgctggggacctgctcaccgccctgtacttcatctcccggggctccatcgagatcctgcggggcgacgtcgtcgtggccatcctggggaagaatgacatctttggggagcctctgaacctgtatgcaaggcctggcaagtcgaacggggatgtgcgggccctcacctactgtgacctacacaagatccatcgggacgacctgctggaggtgctggacatgtaccctgagttctccgaccacttctggtccagcctggagatcaccttcaacctgcgagataccaacatgatcccgggctcccccggcagtacggagttagagggtggcttcagtcggcaacgcaagcgcaagttgtccttccgcaggcgcacggacaaggacacggagcagccaggggaggtgtcggccttggggccgggccgggcgggggcagggccgagtagccggggccggccgggggggccgtggggggagagcccgtccagtggcccctccagccctgagagcagtgaggatgagggcccaggccgcagctccagccccctccgcctggtgcccttctccagccccaggccccccggagagccgccgggtggggagcccctgatggaggactgcgagaagagcagcgacacttgcaaccccctgtcaggcgccttctcaggagtgtccaacattttcagcttctggggggacagtcggggccgccagtaccaggagctccctcgatgccccgcccccacccccagcctcctcaacatccccctctccagcccgggtcggcggccccggggcgacgtggagagcaggctggatgccctccagcgccagctcaacaggctggagacccggctgagtgcagacatggccactgtcctgcagctgctacagaggcagatgacgctggtcccgcccgcctacagtgctgtgaccaccccggggcctggccccacttccacatccccgctgttgcccgtcagccccctccccaccctcaccttggactcgctttctcaggtttcccagttcatggcgtgtgaggagctgcccccgggggccccagagcttccccaagaaggccccacacgacgcctctccctaccgggccagctgggggccctcacctcccagcccctgcacagacacggctcggacccgggcagttagtggggctgcccagtgtggacacgtggctcacccagggatcaaggcgctgctgggccgctccccttggaggccctgctcaggaggccctgaccgtggaaggggagaggaactcgaaagcacagctcctcccccagcccttgggaccatcttctcctgcagtcccctgggccccagtgagaggggcaggggcagggccggcagtaggtggggcctgtggtccccccactgccctgagggcattagctggtctaactgcccggaggcacccggccctgggccttaggcacctcaaggacttttctgctatttactgctcttattgttaaggataataattaaggatcatatgaataattaatgaagatgctgatgactatgaataataaataattatcctgaggaga

SEQ ID NO: 812 - DNA, 3884 bp, Homo sapiens
  source 1..3884: mol_type = genomic DNA
  misc_feature 1..3884: note = cDNA of KCNH2 gene SNP c.3233A>G (p.Tyr1078Cys)
atgccggtgcggaggggccacgtcgcgccgcagaacaccttcctggacaccatcatccgcaagtttgagggccagagccgtaagttcatcatcgccaacgctcgggtggagaactgcgccgtcatctactgcaacgacggcttctgcgagctgtgcggctactcgcgggccgaggtgatgcagcgaccctgcacctgcgacttcctgcacgggccgcgcacgcagcgccgcgctgccgcgcagatcgcgcaggcactgctgggcgccgaggagcgcaaagtggaaatcgccttctaccggaaagatgggagctgcttcctatgtctggtggatgtggtgcccgtgaagaacgaggatggggctgtcatcatgttcatcctcaatttcgaggtggtgatggagaaggacatggtggggtccccggctcatgacaccaaccaccggggcccccccaccagctggctggccccaggccgcgccaagaccttccgcctgaagctgcccgcgctgctggcgctgacggcccgggagtcgtcggtgcggtcgggcggcgcgggcggcgcgggcgccccgggggccgtggtggtggacgtggacctgacgcccgcggcacccagcagcgagtcgctggccctggacgaagtgacagccatggacaaccacgtggcagggctcgggcccgcggaggagcggcgtgcgctggtgggtcccggctctccgccccgcagcgcgcccggccagctcccatcgccccgggcgcacagcctcaaccccgacgcctcgggctccagctgcagcctggcccggacgcgctcccgagaaagctgcgccagcgtgcgccgcgcctcgtcggccgacgacatcgaggccatgcgcgccggggtgctgcccccgccaccgcgccacgccagcaccggggccatgcacccactgcgcagcggcttgctcaactccacctcggactccgacctcgtgcgctaccgcaccattagcaagattccccaaatcaccctcaactttgtggacctcaagggcgaccccttcttggcttcgcccaccagtgaccgtgagatcatagcacctaagataaaggagcgaacccacaatgtcactgagaaggtcacccaggtcctgtccctgggcgccgacgtgctgcctgagtacaagctgcaggcaccgcgcatccaccgctggaccatcctgcattacagccccttcaaggccgtgtgggactggctcatcctgctgctggtcatctacacggctgtcttcacaccctactcggctgccttcctgctgaaggagacggaagaaggcccgcctgctaccgagtgtggctacgcctgccagccgctggctgtggtggacctcatcgtggacatcatgttcattgtggacatcctcatcaacttccgcaccacctacgtcaatgccaacgaggaggtggtcagccaccccggccgcatcgccgtccactacttcaagggctggttcctcatcgacatggtggccgccatccccttcgacctgctcatcttcggctctggctctgaggagctgatcgggctgctgaagactgcgcggctgctgcggctggtgcgcgtggcgcggaagctggatcgctactcagagtacggcgcggccgtgctgttcttgctcatgtgcacctttgcgctcatcgcgcactggctagcctgcatctggtacgccatcggcaacatggagcagccacacatggactcacgcatcggctggctgcacaacctgggcgaccagataggcaaaccctacaacagcagcggcctgggcggcccctccatcaaggacaagtatgtgacggcgctctacttcaccttcagcagcctcaccagtgtgggcttcggcaacgtctctcccaacaccaactcagagaagatcttctccatctgcgtcatgctcattggctccctcatgtatgctagcatcttcggcaacgtgtcggccatcatccagcggctgtactcgggcacagcccgctaccacacacagatgctgcgggtgcgggagttcatccgcttccaccagatccccaatcccctgcgccagcgcctcgaggagtacttccagcacgcctggtcctacaccaacggcatcgacatgaacgcggtgctgaagggcttccctgagtgcctgcaggctgacatctgcctgcacctgaaccgctcactgctgcagcactgcaaacccttccgaggggccaccaagggctgccttcgggccctggccatgaagttcaagaccacacatgcaccgccaggggacacactggtgcatgctggggacctgctcaccgccctgtacttcatctcccggggctccatcgagatcctgcggggcgacgtcgtcgtggccatcctggggaagaatgacatctttggggagcctctgaacctgtatgcaaggcctggcaagtcgaacggggatgtgcgggccctcacctactgtgacctacacaagatccatcgggacgacctgctggaggtgctggacatgtaccctgagttctccgaccacttctggtccagcctggagatcaccttcaacctgcgagataccaacatgatcccgggctcccccggcagtacggagttagagggtggcttcagtcggcaacgcaagcgcaagttgtccttccgcaggcgcacggacaaggacacggagcagccaggggaggtgtcggccttggggccgggccgggcgggggcagggccgagtagccggggccggccgggggggccgtggggggagagcccgtccagtggcccctccagccctgagagcagtgaggatgagggcccaggccgcagctccagccccctccgcctggtgcccttctccagccccaggccccccggagagccgccgggtggggagcccctgatggaggactgcgagaagagcagcgacacttgcaaccccctgtcaggcgccttctcaggagtgtccaacattttcagcttctggggggacagtcggggccgccagtaccaggagctccctcgatgccccgcccccacccccagcctcctcaacatccccctctccagcccgggtcggcggccccggggcgacgtggagagcaggctggatgccctccagcgccagctcaacaggctggagacccggctgagtgcagacatggccactgtcctgcagctgctacagaggcagatgacgctggtcccgcccgcctgcagtgctgtgaccaccccggggcctggccccacttccacatccccgctgttgcccgtcagccccctccccaccctcaccttggactcgctttctcaggtttcccagttcatggcgtgtgaggagctgcccccgggggccccagagcttccccaagaaggccccacacgacgcctctccctaccgggccagctgggggccctcacctcccagcccctgcacagacacggctcggacccgggcagttagtggggctgcccagtgtggacacgtggctcacccagggatcaaggcgctgctgggccgctccccttggaggccctgctcaggaggccctgaccgtggaaggggagaggaactcgaaagcacagctcctcccccagcccttgggaccatcttctcctgcagtcccctgggccccagtgagaggggcaggggcagggccggcagtaggtggggcctgtggtccccccactgccctgagggcattagctggtctaactgcccggaggcacccggccctgggccttaggcacctcaaggacttttctgctatttactgctcttattgttaaggataataattaaggatcatatgaataattaatgaagatgctgatgactatgaataataaataattatcctgaggaga

SEQ ID NO: 813 - DNA, 3884 bp, Homo sapiens
  source 1..3884: mol_type = genomic DNA
  misc_feature 1..3884: note = cDNA of KCNH2 gene SNP c.3247A>G (p.Thr1083Ala)
atgccggtgcggaggggccacgtcgcgccgcagaacaccttcctggacaccatcatccgcaagtttgagggccagagccgtaagttcatcatcgccaacgctcgggtggagaactgcgccgtcatctactgcaacgacggcttctgcgagctgtgcggctactcgcgggccgaggtgatgcagcgaccctgcacctgcgacttcctgcacgggccgcgcacgcagcgccgcgctgccgcgcagatcgcgcaggcactgctgggcgccgaggagcgcaaagtggaaatcgccttctaccggaaagatgggagctgcttcctatgtctggtggatgtggtgcccgtgaagaacgaggatggggctgtcatcatgttcatcctcaatttcgaggtggtgatggagaaggacatggtggggtccccggctcatgacaccaaccaccggggcccccccaccagctggctggccccaggccgcgccaagaccttccgcctgaagctgcccgcgctgctggcgctgacggcccgggagtcgtcggtgcggtcgggcggcgcgggcggcgcgggcgccccgggggccgtggtggtggacgtggacctgacgcccgcggcacccagcagcgagtcgctggccctggacgaagtgacagccatggacaaccacgtggcagggctcgggcccgcggaggagcggcgtgcgctggtgggtcccggctctccgccccgcagcgcgcccggccagctcccatcgccccgggcgcacagcctcaaccccgacgcctcgggctccagctgcagcctggcccggacgcgctcccgagaaagctgcgccagcgtgcgccgcgcctcgtcggccgacgacatcgaggccatgcgcgccggggtgctgcccccgccaccgcgccacgccagcaccggggccatgcacccactgcgcagcggcttgctcaactccacctcggactccgacctcgtgcgctaccgcaccattagcaagattccccaaatcaccctcaactttgtggacctcaagggcgaccccttcttggcttcgcccaccagtgaccgtgagatcatagcacctaagataaaggagcgaacccacaatgtcactgagaaggtcacccaggtcctgtccctgggcgccgacgtgctgcctgagtacaagctgcaggcaccgcgcatccaccgctggaccatcctgcattacagccccttcaaggccgtgtgggactggctcatcctgctgctggtcatctacacggctgtcttcacaccctactcggctgccttcctgctgaaggagacggaagaaggcccgcctgctaccgagtgtggctacgcctgccagccgctggctgtggtggacctcatcgtggacatcatgttcattgtggacatcctcatcaacttccgcaccacctacgtcaatgccaacgaggaggtggtcagccaccccggccgcatcgccgtccactacttcaagggctggttcctcatcgacatggtggccgccatccccttcgacctgctcatcttcggctctggctctgaggagctgatcgggctgctgaagactgcgcggctgctgcggctggtgcgcgtggcgcggaagctggatcgctactcagagtacggcgcggccgtgctgttcttgctcatgtgcacctttgcgctcatcgcgcactggctagcctgcatctggtacgccatcggcaacatggagcagccacacatggactcacgcatcggctggctgcacaacctgggcgaccagataggcaaaccctacaacagcagcggcctgggcggcccctccatcaaggacaagtatgtgacggcgctctacttcaccttcagcagcctcaccagtgtgggcttcggcaacgtctctcccaacaccaactcagagaagatcttctccatctgcgtcatgctcattggctccctcatgtatgctagcatcttcggcaacgtgtcggccatcatccagcggctgtactcgggcacagcccgctaccacacacagatgctgcgggtgcgggagttcatccgcttccaccagatccccaatcccctgcgccagcgcctcgaggagtacttccagcacgcctggtcctacaccaacggcatcgacatgaacgcggtgctgaagggcttccctgagtgcctgcaggctgacatctgcctgcacctgaaccgctcactgctgcagcactgcaaacccttccgaggggccaccaagggctgccttcgggccctggccatgaagttcaagaccacacatgcaccgccaggggacacactggtgcatgctggggacctgctcaccgccctgtacttcatctcccggggctccatcgagatcctgcggggcgacgtcgtcgtggccatcctggggaagaatgacatctttggggagcctctgaacctgtatgcaaggcctggcaagtcgaacggggatgtgcgggccctcacctactgtgacctacacaagatccatcgggacgacctgctggaggtgctggacatgtaccctgagttctccgaccacttctggtccagcctggagatcaccttcaacctgcgagataccaacatgatcccgggctcccccggcagtacggagttagagggtggcttcagtcggcaacgcaagcgcaagttgtccttccgcaggcgcacggacaaggacacggagcagccaggggaggtgtcggccttggggccgggccgggcgggggcagggccgagtagccggggccggccgggggggccgtggggggagagcccgtccagtggcccctccagccctgagagcagtgaggatgagggcccaggccgcagctccagccccctccgcctggtgcccttctccagccccaggccccccggagagccgccgggtggggagcccctgatggaggactgcgagaagagcagcgacacttgcaaccccctgtcaggcgccttctcaggagtgtccaacattttcagcttctggggggacagtcggggccgccagtaccaggagctccctcgatgccccgcccccacccccagcctcctcaacatccccctctccagcccgggtcggcggccccggggcgacgtggagagcaggctggatgccctccagcgccagctcaacaggctggagacccggctgagtgcagacatggccactgtcctgcagctgctacagaggcagatgacgctggtcccgcccgcctacagtgctgtgaccgccccggggcctggccccacttccacatccccgctgttgcccgtcagccccctccccaccctcaccttggactcgctttctcaggtttcccagttcatggcgtgtgaggagctgcccccgggggccccagagcttccccaagaaggccccacacgacgcctctccctaccgggccagctgggggccctcacctcccagcccctgcacagacacggctcggacccgggcagttagtggggctgcccagtgtggacacgtggctcacccagggatcaaggcgctgctgggccgctccccttggaggccctgctcaggaggccctgaccgtggaaggggagaggaactcgaaagcacagctcctcccccagcccttgggaccatcttctcctgcagtcccctgggccccagtgagaggggcaggggcagggccggcagtaggtggggcctgtggtccccccactgccctgagggcattagctggtctaactgcccggaggcacccggccctgggccttaggcacctcaaggacttttctgctatttactgctcttattgttaaggataataattaaggatcatatgaataattaatgaagatgctgatgactatgaataataaataattatcctgaggaga

SEQ ID NO: 814 - DNA, 3884 bp, Homo sapiens
  source 1..3884: mol_type = genomic DNA
  misc_feature 1..3884: note = cDNA of KCNH2 gene SNP c.3251C>T (p.Pro1084Leu)
atgccggtgcggaggggccacgtcgcgccgcagaacaccttcctggacaccatcatccgcaagtttgagggccagagccgtaagttcatcatcgccaacgctcgggtggagaactgcgccgtcatctactgcaacgacggcttctgcgagctgtgcggctactcgcgggccgaggtgatgcagcgaccctgcacctgcgacttcctgcacgggccgcgcacgcagcgccgcgctgccgcgcagatcgcgcaggcactgctgggcgccgaggagcgcaaagtggaaatcgccttctaccggaaagatgggagctgcttcctatgtctggtggatgtggtgcccgtgaagaacgaggatggggctgtcatcatgttcatcctcaatttcgaggtggtgatggagaaggacatggtggggtccccggctcatgacaccaaccaccggggcccccccaccagctggctggccccaggccgcgccaagaccttccgcctgaagctgcccgcgctgctggcgctgacggcccgggagtcgtcggtgcggtcgggcggcgcgggcggcgcgggcgccccgggggccgtggtggtggacgtggacctgacgcccgcggcacccagcagcgagtcgctggccctggacgaagtgacagccatggacaaccacgtggcagggctcgggcccgcggaggagcggcgtgcgctggtgggtcccggctctccgccccgcagcgcgcccggccagctcccatcgccccgggcgcacagcctcaaccccgacgcctcgggctccagctgcagcctggcccggacgcgctcccgagaaagctgcgccagcgtgcgccgcgcctcgtcggccgacgacatcgaggccatgcgcgccggggtgctgcccccgccaccgcgccacgccagcaccggggccatgcacccactgcgcagcggcttgctcaactccacctcggactccgacctcgtgcgctaccgcaccattagcaagattccccaaatcaccctcaactttgtggacctcaagggcgaccccttcttggcttcgcccaccagtgaccgtgagatcatagcacctaagataaaggagcgaacccacaatgtcactgagaaggtcacccaggtcctgtccctgggcgccgacgtgctgcctgagtacaagctgcaggcaccgcgcatccaccgctggaccatcctgcattacagccccttcaaggccgtgtgggactggctcatcctgctgctggtcatctacacggctgtcttcacaccctactcggctgccttcctgctgaaggagacggaagaaggcccgcctgctaccgagtgtggctacgcctgccagccgctggctgtggtggacctcatcgtggacatcatgttcattgtggacatcctcatcaacttccgcaccacctacgtcaatgccaacgaggaggtggtcagccaccccggccgcatcgccgtccactacttcaagggctggttcctcatcgacatggtggccgccatccccttcgacctgctcatcttcggctctggctctgaggagctgatcgggctgctgaagactgcgcggctgctgcggctggtgcgcgtggcgcggaagctggatcgctactcagagtacggcgcggccgtgctgttcttgctcatgtgcacctttgcgctcatcgcgcactggctagcctgcatctggtacgccatcggcaacatggagcagccacacatggactcacgcatcggctggctgcacaacctgggcgaccagataggcaaaccctacaacagcagcggcctgggcggcccctccatcaaggacaagtatgtgacggcgctctacttcaccttcagcagcctcaccagtgtgggcttcggcaacgtctctcccaacaccaactcagagaagatcttctccatctgcgtcatgctcattggctccctcatgtatgctagcatcttcggcaacgtgtcggccatcatccagcggctgtactcgggcacagcccgctaccacacacagatgctgcgggtgcgggagttcatccgcttccaccagatccccaatcccctgcgccagcgcctcgaggagtacttccagcacgcctggtcctacaccaacggcatcgacatgaacgcggtgctgaagggcttccctgagtgcctgcaggctgacatctgcctgcacctgaaccgctcactgctgcagcactgcaaacccttccgaggggccaccaagggctgccttcgggccctggccatgaagttcaagaccacacatgcaccgccaggggacacactggtgcatgctggggacctgctcaccgccctgtacttcatctcccggggctccatcgagatcctgcggggcgacgtcgtcgtggccatcctggggaagaatgacatctttggggagcctctgaacctgtatgcaaggcctggcaagtcgaacggggatgtgcgggccctcacctactgtgacctacacaagatccatcgggacgacctgctggaggtgctggacatgtaccctgagttctccgaccacttctggtccagcctggagatcaccttcaacctgcgagataccaacatgatcccgggctcccccggcagtacggagttagagggtggcttcagtcggcaacgcaagcgcaagttgtccttccgcaggcgcacggacaaggacacggagcagccaggggaggtgtcggccttggggccgggccgggcgggggcagggccgagtagccggggccggccgggggggccgtggggggagagcccgtccagtggcccctccagccctgagagcagtgaggatgagggcccaggccgcagctccagccccctccgcctggtgcccttctccagccccaggccccccggagagccgccgggtggggagcccctgatggaggactgcgagaagagcagcgacacttgcaaccccctgtcaggcgccttctcaggagtgtccaacattttcagcttctggggggacagtcggggccgccagtaccaggagctccctcgatgccccgcccccacccccagcctcctcaacatccccctctccagcccgggtcggcggccccggggcgacgtggagagcaggctggatgccctccagcgccagctcaacaggctggagacccggctgagtgcagacatggccactgtcctgcagctgctacagaggcagatgacgctggtcccgcccgcctacagtgctgtgaccaccctggggcctggccccacttccacatccccgctgttgcccgtcagccccctccccaccctcaccttggactcgctttctcaggtttcccagttcatggcgtgtgaggagctgcccccgggggccccagagcttccccaagaaggccccacacgacgcctctccctaccgggccagctgggggccctcacctcccagcccctgcacagacacggctcggacccgggcagttagtggggctgcccagtgtggacacgtggctcacccagggatcaaggcgctgctgggccgctccccttggaggccctgctcaggaggccctgaccgtggaaggggagaggaactcgaaagcacagctcctcccccagcccttgggaccatcttctcctgcagtcccctgggccccagtgagaggggcaggggcagggccggcagtaggtggggcctgtggtccccccactgccctgagggcattagctggtctaactgcccggaggcacccggccctgggccttaggcacctcaaggacttttctgctatttactgctcttattgttaaggataataattaaggatcatatgaataattaatgaagatgctgatgactatgaataataaataattatcctgaggaga

SEQ ID NO: 815 - DNA, 3884 bp, Homo sapiens
  source 1..3884: mol_type = genomic DNA
  misc_feature 1..3884: note = cDNA of KCNH2 gene SNP c.3263C>G (p.Pro1088Arg)
atgccggtgcggaggggccacgtcgcgccgcagaacaccttcctggacaccatcatccgcaagtttgagggccagagccgtaagttcatcatcgccaacgctcgggtggagaactgcgccgtcatctactgcaacgacggcttctgcgagctgtgcggctactcgcgggccgaggtgatgcagcgaccctgcacctgcgacttcctgcacgggccgcgcacgcagcgccgcgctgccgcgcagatcgcgcaggcactgctgggcgccgaggagcgcaaagtggaaatcgccttctaccggaaagatgggagctgcttcctatgtctggtggatgtggtgcccgtgaagaacgaggatggggctgtcatcatgttcatcctcaatttcgaggtggtgatggagaaggacatggtggggtccccggctcatgacaccaaccaccggggcccccccaccagctggctggccccaggccgcgccaagaccttccgcctgaagctgcccgcgctgctggcgctgacggcccgggagtcgtcggtgcggtcgggcggcgcgggcggcgcgggcgccccgggggccgtggtggtggacgtggacctgacgcccgcggcacccagcagcgagtcgctggccctggacgaagtgacagccatggacaaccacgtggcagggctcgggcccgcggaggagcggcgtgcgctggtgggtcccggctctccgccccgcagcgcgcccggccagctcccatcgccccgggcgcacagcctcaaccccgacgcctcgggctccagctgcagcctggcccggacgcgctcccgagaaagctgcgccagcgtgcgccgcgcctcgtcggccgacgacatcgaggccatgcgcgccggggtgctgcccccgccaccgcgccacgccagcaccggggccatgcacccactgcgcagcggcttgctcaactccacctcggactccgacctcgtgcgctaccgcaccattagcaagattccccaaatcaccctcaactttgtggacctcaagggcgaccccttcttggcttcgcccaccagtgaccgtgagatcatagcacctaagataaaggagcgaacccacaatgtcactgagaaggtcacccaggtcctgtccctgggcgccgacgtgctgcctgagtacaagctgcaggcaccgcgcatccaccgctggaccatcctgcattacagccccttcaaggccgtgtgggactggctcatcctgctgctggtcatctacacggctgtcttcacaccctactcggctgccttcctgctgaaggagacggaagaaggcccgcctgctaccgagtgtggctacgcctgccagccgctggctgtggtggacctcatcgtggacatcatgttcattgtggacatcctcatcaacttccgcaccacctacgtcaatgccaacgaggaggtggtcagccaccccggccgcatcgccgtccactacttcaagggctggttcctcatcgacatggtggccgccatccccttcgacctgctcatcttcggctctggctctgaggagctgatcgggctgctgaagactgcgcggctgctgcggctggtgcgcgtggcgcggaagctggatcgctactcagagtacggcgcggccgtgctgttcttgctcatgtgcacctttgcgctcatcgcgcactggctagcctgcatctggtacgccatcggcaacatggagcagccacacatggactcacgcatcggctggctgcacaacctgggcgaccagataggcaaaccctacaacagcagcggcctgggcggcccctccatcaaggacaagtatgtgacggcgctctacttcaccttcagcagcctcaccagtgtgggcttcggcaacgtctctcccaacaccaactcagagaagatcttctccatctgcgtcatgctcattggctccctcatgtatgctagcatcttcggcaacgtgtcggccatcatccagcggctgtactcgggcacagcccgctaccacacacagatgctgcgggtgcgggagttcatccgcttccaccagatccccaatcccctgcgccagcgcctcgaggagtacttccagcacgcctggtcctacaccaacggcatcgacatgaacgcggtgctgaagggcttccctgagtgcctgcaggctgacatctgcctgcacctgaaccgctcactgctgcagcactgcaaacccttccgaggggccaccaagggctgccttcgggccctggccatgaagttcaagaccacacatgcaccgccaggggacacactggtgcatgctggggacctgctcaccgccctgtacttcatctcccggggctccatcgagatcctgcggggcgacgtcgtcgtggccatcctggggaagaatgacatctttggggagcctctgaacctgtatgcaaggcctggcaagtcgaacggggatgtgcgggccctcacctactgtgacctacacaagatccatcgggacgacctgctggaggtgctggacatgtaccctgagttctccgaccacttctggtccagcctggagatcaccttcaacctgcgagataccaacatgatcccgggctcccccggcagtacggagttagagggtggcttcagtcggcaacgcaagcgcaagttgtccttccgcaggcgcacggacaaggacacggagcagccaggggaggtgtcggccttggggccgggccgggcgggggcagggccgagtagccggggccggccgggggggccgtggggggagagcccgtccagtggcccctccagccctgagagcagtgaggatgagggcccaggccgcagctccagccccctccgcctggtgcccttctccagccccaggccccccggagagccgccgggtggggagcccctgatggaggactgcgagaagagcagcgacacttgcaaccccctgtcaggcgccttctcaggagtgtccaacattttcagcttctggggggacagtcggggccgccagtaccaggagctccctcgatgccccgcccccacccccagcctcctcaacatccccctctccagcccgggtcggcggccccggggcgacgtggagagcaggctggatgccctccagcgccagctcaacaggctggagacccggctgagtgcagacatggccactgtcctgcagctgctacagaggcagatgacgctggtcccgcccgcctacagtgctgtgaccaccccggggcctggccgcacttccacatccccgctgttgcccgtcagccccctccccaccctcaccttggactcgctttctcaggtttcccagttcatggcgtgtgaggagctgcccccgggggccccagagcttccccaagaaggccccacacgacgcctctccctaccgggccagctgggggccctcacctcccagcccctgcacagacacggctcggacccgggcagttagtggggctgcccagtgtggacacgtggctcacccagggatcaaggcgctgctgggccgctccccttggaggccctgctcaggaggccctgaccgtggaaggggagaggaactcgaaagcacagctcctcccccagcccttgggaccatcttctcctgcagtcccctgggccccagtgagaggggcaggggcagggccggcagtaggtggggcctgtggtccccccactgccctgagggcattagctggtctaactgcccggaggcacccggccctgggccttaggcacctcaaggacttttctgctatttactgctcttattgttaaggataataattaaggatcatatgaataattaatgaagatgctgatgactatgaataataaataattatcctgaggaga

SEQ ID NO: 816 - DNA, 3884 bp, Homo sapiens
  source 1..3884: mol_type = genomic DNA
  misc_feature 1..3884: note = cDNA of KCNH2 gene SNP c.326T>G (p.Leu109Arg)
atgccggtgcggaggggccacgtcgcgccgcagaacaccttcctggacaccatcatccgcaagtttgagggccagagccgtaagttcatcatcgccaacgctcgggtggagaactgcgccgtcatctactgcaacgacggcttctgcgagctgtgcggctactcgcgggccgaggtgatgcagcgaccctgcacctgcgacttcctgcacgggccgcgcacgcagcgccgcgctgccgcgcagatcgcgcaggcactgctgggcgccgaggagcgcaaagtggaaatcgccttctaccggaaagatgggagctgcttcctatgtcgggtggatgtggtgcccgtgaagaacgaggatggggctgtcatcatgttcatcctcaatttcgaggtggtgatggagaaggacatggtggggtccccggctcatgacaccaaccaccggggcccccccaccagctggctggccccaggccgcgccaagaccttccgcctgaagctgcccgcgctgctggcgctgacggcccgggagtcgtcggtgcggtcgggcggcgcgggcggcgcgggcgccccgggggccgtggtggtggacgtggacctgacgcccgcggcacccagcagcgagtcgctggccctggacgaagtgacagccatggacaaccacgtggcagggctcgggcccgcggaggagcggcgtgcgctggtgggtcccggctctccgccccgcagcgcgcccggccagctcccatcgccccgggcgcacagcctcaaccccgacgcctcgggctccagctgcagcctggcccggacgcgctcccgagaaagctgcgccagcgtgcgccgcgcctcgtcggccgacgacatcgaggccatgcgcgccggggtgctgcccccgccaccgcgccacgccagcaccggggccatgcacccactgcgcagcggcttgctcaactccacctcggactccgacctcgtgcgctaccgcaccattagcaagattccccaaatcaccctcaactttgtggacctcaagggcgaccccttcttggcttcgcccaccagtgaccgtgagatcatagcacctaagataaaggagcgaacccacaatgtcactgagaaggtcacccaggtcctgtccctgggcgccgacgtgctgcctgagtacaagctgcaggcaccgcgcatccaccgctggaccatcctgcattacagccccttcaaggccgtgtgggactggctcatcctgctgctggtcatctacacggctgtcttcacaccctactcggctgccttcctgctgaaggagacggaagaaggcccgcctgctaccgagtgtggctacgcctgccagccgctggctgtggtggacctcatcgtggacatcatgttcattgtggacatcctcatcaacttccgcaccacctacgtcaatgccaacgaggaggtggtcagccaccccggccgcatcgccgtccactacttcaagggctggttcctcatcgacatggtggccgccatccccttcgacctgctcatcttcggctctggctctgaggagctgatcgggctgctgaagactgcgcggctgctgcggctggtgcgcgtggcgcggaagctggatcgctactcagagtacggcgcggccgtgctgttcttgctcatgtgcacctttgcgctcatcgcgcactggctagcctgcatctggtacgccatcggcaacatggagcagccacacatggactcacgcatcggctggctgcacaacctgggcgaccagataggcaaaccctacaacagcagcggcctgggcggcccctccatcaaggacaagtatgtgacggcgctctacttcaccttcagcagcctcaccagtgtgggcttcggcaacgtctctcccaacaccaactcagagaagatcttctccatctgcgtcatgctcattggctccctcatgtatgctagcatcttcggcaacgtgtcggccatcatccagcggctgtactcgggcacagcccgctaccacacacagatgctgcgggtgcgggagttcatccgcttccaccagatccccaatcccctgcgccagcgcctcgaggagtacttccagcacgcctggtcctacaccaacggcatcgacatgaacgcggtgctgaagggcttccctgagtgcctgcaggctgacatctgcctgcacctgaaccgctcactgctgcagcactgcaaacccttccgaggggccaccaagggctgccttcgggccctggccatgaagttcaagaccacacatgcaccgccaggggacacactggtgcatgctggggacctgctcaccgccctgtacttcatctcccggggctccatcgagatcctgcggggcgacgtcgtcgtggccatcctggggaagaatgacatctttggggagcctctgaacctgtatgcaaggcctggcaagtcgaacggggatgtgcgggccctcacctactgtgacctacacaagatccatcgggacgacctgctggaggtgctggacatgtaccctgagttctccgaccacttctggtccagcctggagatcaccttcaacctgcgagataccaacatgatcccgggctcccccggcagtacggagttagagggtggcttcagtcggcaacgcaagcgcaagttgtccttccgcaggcgcacggacaaggacacggagcagccaggggaggtgtcggccttggggccgggccgggcgggggcagggccgagtagccggggccggccgggggggccgtggggggagagcccgtccagtggcccctccagccctgagagcagtgaggatgagggcccaggccgcagctccagccccctccgcctggtgcccttctccagccccaggccccccggagagccgccgggtggggagcccctgatggaggactgcgagaagagcagcgacacttgcaaccccctgtcaggcgccttctcaggagtgtccaacattttcagcttctggggggacagtcggggccgccagtaccaggagctccctcgatgccccgcccccacccccagcctcctcaacatccccctctccagcccgggtcggcggccccggggcgacgtggagagcaggctggatgccctccagcgccagctcaacaggctggagacccggctgagtgcagacatggccactgtcctgcagctgctacagaggcagatgacgctggtcccgcccgcctacagtgctgtgaccaccccggggcctggccccacttccacatccccgctgttgcccgtcagccccctccccaccctcaccttggactcgctttctcaggtttcccagttcatggcgtgtgaggagctgcccccgggggccccagagcttccccaagaaggccccacacgacgcctctccctaccgggccagctgggggccctcacctcccagcccctgcacagacacggctcggacccgggcagttagtggggctgcccagtgtggacacgtggctcacccagggatcaaggcgctgctgggccgctccccttggaggccctgctcaggaggccctgaccgtggaaggggagaggaactcgaaagcacagctcctcccccagcccttgggaccatcttctcctgcagtcccctgggccccagtgagaggggcaggggcagggccggcagtaggtggggcctgtggtccccccactgccctgagggcattagctggtctaactgcccggaggcacccggccctgggccttaggcacctcaaggacttttctgctatttactgctcttattgttaaggataataattaaggatcatatgaataattaatgaagatgctgatgactatgaataataaataattatcctgaggaga

SEQ ID NO: 817 - DNA, 3884 bp, Homo sapiens
  source 1..3884: mol_type = genomic DNA
  misc_feature 1..3884: note = cDNA of KCNH2 gene SNP c.3278C>T (p.Pro1093Leu)
atgccggtgcggaggggccacgtcgcgccgcagaacaccttcctggacaccatcatccgcaagtttgagggccagagccgtaagttcatcatcgccaacgctcgggtggagaactgcgccgtcatctactgcaacgacggcttctgcgagctgtgcggctactcgcgggccgaggtgatgcagcgaccctgcacctgcgacttcctgcacgggccgcgcacgcagcgccgcgctgccgcgcagatcgcgcaggcactgctgggcgccgaggagcgcaaagtggaaatcgccttctaccggaaagatgggagctgcttcctatgtctggtggatgtggtgcccgtgaagaacgaggatggggctgtcatcatgttcatcctcaatttcgaggtggtgatggagaaggacatggtggggtccccggctcatgacaccaaccaccggggcccccccaccagctggctggccccaggccgcgccaagaccttccgcctgaagctgcccgcgctgctggcgctgacggcccgggagtcgtcggtgcggtcgggcggcgcgggcggcgcgggcgccccgggggccgtggtggtggacgtggacctgacgcccgcggcacccagcagcgagtcgctggccctggacgaagtgacagccatggacaaccacgtggcagggctcgggcccgcggaggagcggcgtgcgctggtgggtcccggctctccgccccgcagcgcgcccggccagctcccatcgccccgggcgcacagcctcaaccccgacgcctcgggctccagctgcagcctggcccggacgcgctcccgagaaagctgcgccagcgtgcgccgcgcctcgtcggccgacgacatcgaggccatgcgcgccggggtgctgcccccgccaccgcgccacgccagcaccggggccatgcacccactgcgcagcggcttgctcaactccacctcggactccgacctcgtgcgctaccgcaccattagcaagattccccaaatcaccctcaactttgtggacctcaagggcgaccccttcttggcttcgcccaccagtgaccgtgagatcatagcacctaagataaaggagcgaacccacaatgtcactgagaaggtcacccaggtcctgtccctgggcgccgacgtgctgcctgagtacaagctgcaggcaccgcgcatccaccgctggaccatcctgcattacagccccttcaaggccgtgtgggactggctcatcctgctgctggtcatctacacggctgtcttcacaccctactcggctgccttcctgctgaaggagacggaagaaggcccgcctgctaccgagtgtggctacgcctgccagccgctggctgtggtggacctcatcgtggacatcatgttcattgtggacatcctcatcaacttccgcaccacctacgtcaatgccaacgaggaggtggtcagccaccccggccgcatcgccgtccactacttcaagggctggttcctcatcgacatggtggccgccatccccttcgacctgctcatcttcggctctggctctgaggagctgatcgggctgctgaagactgcgcggctgctgcggctggtgcgcgtggcgcggaagctggatcgctactcagagtacggcgcggccgtgctgttcttgctcatgtgcacctttgcgctcatcgcgcactggctagcctgcatctggtacgccatcggcaacatggagcagccacacatggactcacgcatcggctggctgcacaacctgggcgaccagataggcaaaccctacaacagcagcggcctgggcggcccctccatcaaggacaagtatgtgacggcgctctacttcaccttcagcagcctcaccagtgtgggcttcggcaacgtctctcccaacaccaactcagagaagatcttctccatctgcgtcatgctcattggctccctcatgtatgctagcatcttcggcaacgtgtcggccatcatccagcggctgtactcgggcacagcccgctaccacacacagatgctgcgggtgcgggagttcatccgcttccaccagatccccaatcccctgcgccagcgcctcgaggagtacttccagcacgcctggtcctacaccaacggcatcgacatgaacgcggtgctgaagggcttccctgagtgcctgcaggctgacatctgcctgcacctgaaccgctcactgctgcagcactgcaaacccttccgaggggccaccaagggctgccttcgggccctggccatgaagttcaagaccacacatgcaccgccaggggacacactggtgcatgctggggacctgctcaccgccctgtacttcatctcccggggctccatcgagatcctgcggggcgacgtcgtcgtggccatcctggggaagaatgacatctttggggagcctctgaacctgtatgcaaggcctggcaagtcgaacggggatgtgcgggccctcacctactgtgacctacacaagatccatcgggacgacctgctggaggtgctggacatgtaccctgagttctccgaccacttctggtccagcctggagatcaccttcaacctgcgagataccaacatgatcccgggctcccccggcagtacggagttagagggtggcttcagtcggcaacgcaagcgcaagttgtccttccgcaggcgcacggacaaggacacggagcagccaggggaggtgtcggccttggggccgggccgggcgggggcagggccgagtagccggggccggccgggggggccgtggggggagagcccgtccagtggcccctccagccctgagagcagtgaggatgagggcccaggccgcagctccagccccctccgcctggtgcccttctccagccccaggccccccggagagccgccgggtggggagcccctgatggaggactgcgagaagagcagcgacacttgcaaccccctgtcaggcgccttctcaggagtgtccaacattttcagcttctggggggacagtcggggccgccagtaccaggagctccctcgatgccccgcccccacccccagcctcctcaacatccccctctccagcccgggtcggcggccccggggcgacgtggagagcaggctggatgccctccagcgccagctcaacaggctggagacccggctgagtgcagacatggccactgtcctgcagctgctacagaggcagatgacgctggtcccgcccgcctacagtgctgtgaccaccccggggcctggccccacttccacatccctgctgttgcccgtcagccccctccccaccctcaccttggactcgctttctcaggtttcccagttcatggcgtgtgaggagctgcccccgggggccccagagcttccccaagaaggccccacacgacgcctctccctaccgggccagctgggggccctcacctcccagcccctgcacagacacggctcggacccgggcagttagtggggctgcccagtgtggacacgtggctcacccagggatcaaggcgctgctgggccgctccccttggaggccctgctcaggaggccctgaccgtggaaggggagaggaactcgaaagcacagctcctcccccagcccttgggaccatcttctcctgcagtcccctgggccccagtgagaggggcaggggcagggccggcagtaggtggggcctgtggtccccccactgccctgagggcattagctggtctaactgcccggaggcacccggccctgggccttaggcacctcaaggacttttctgctatttactgctcttattgttaaggataataattaaggatcatatgaataattaatgaagatgctgatgactatgaataataaataattatcctgaggaga

SEQ ID NO: 818 - DNA, 3884 bp, Homo sapiens
  source 1..3884: mol_type = genomic DNA
  misc_feature 1..3884: note = cDNA of KCNH2 gene SNP c.3286C>A (p.Pro1096Thr)
atgccggtgcggaggggccacgtcgcgccgcagaacaccttcctggacaccatcatccgcaagtttgagggccagagccgtaagttcatcatcgccaacgctcgggtggagaactgcgccgtcatctactgcaacgacggcttctgcgagctgtgcggctactcgcgggccgaggtgatgcagcgaccctgcacctgcgacttcctgcacgggccgcgcacgcagcgccgcgctgccgcgcagatcgcgcaggcactgctgggcgccgaggagcgcaaagtggaaatcgccttctaccggaaagatgggagctgcttcctatgtctggtggatgtggtgcccgtgaagaacgaggatggggctgtcatcatgttcatcctcaatttcgaggtggtgatggagaaggacatggtggggtccccggctcatgacaccaaccaccggggcccccccaccagctggctggccccaggccgcgccaagaccttccgcctgaagctgcccgcgctgctggcgctgacggcccgggagtcgtcggtgcggtcgggcggcgcgggcggcgcgggcgccccgggggccgtggtggtggacgtggacctgacgcccgcggcacccagcagcgagtcgctggccctggacgaagtgacagccatggacaaccacgtggcagggctcgggcccgcggaggagcggcgtgcgctggtgggtcccggctctccgccccgcagcgcgcccggccagctcccatcgccccgggcgcacagcctcaaccccgacgcctcgggctccagctgcagcctggcccggacgcgctcccgagaaagctgcgccagcgtgcgccgcgcctcgtcggccgacgacatcgaggccatgcgcgccggggtgctgcccccgccaccgcgccacgccagcaccggggccatgcacccactgcgcagcggcttgctcaactccacctcggactccgacctcgtgcgctaccgcaccattagcaagattccccaaatcaccctcaactttgtggacctcaagggcgaccccttcttggcttcgcccaccagtgaccgtgagatcatagcacctaagataaaggagcgaacccacaatgtcactgagaaggtcacccaggtcctgtccctgggcgccgacgtgctgcctgagtacaagctgcaggcaccgcgcatccaccgctggaccatcctgcattacagccccttcaaggccgtgtgggactggctcatcctgctgctggtcatctacacggctgtcttcacaccctactcggctgccttcctgctgaaggagacggaagaaggcccgcctgctaccgagtgtggctacgcctgccagccgctggctgtggtggacctcatcgtggacatcatgttcattgtggacatcctcatcaacttccgcaccacctacgtcaatgccaacgaggaggtggtcagccaccccggccgcatcgccgtccactacttcaagggctggttcctcatcgacatggtggccgccatccccttcgacctgctcatcttcggctctggctctgaggagctgatcgggctgctgaagactgcgcggctgctgcggctggtgcgcgtggcgcggaagctggatcgctactcagagtacggcgcggccgtgctgttcttgctcatgtgcacctttgcgctcatcgcgcactggctagcctgcatctggtacgccatcggcaacatggagcagccacacatggactcacgcatcggctggctgcacaacctgggcgaccagataggcaaaccctacaacagcagcggcctgggcggcccctccatcaaggacaagtatgtgacggcgctctacttcaccttcagcagcctcaccagtgtgggcttcggcaacgtctctcccaacaccaactcagagaagatcttctccatctgcgtcatgctcattggctccctcatgtatgctagcatcttcggcaacgtgtcggccatcatccagcggctgtactcgggcacagcccgctaccacacacagatgctgcgggtgcgggagttcatccgcttccaccagatccccaatcccctgcgccagcgcctcgaggagtacttccagcacgcctggtcctacaccaacggcatcgacatgaacgcggtgctgaagggcttccctgagtgcctgcaggctgacatctgcctgcacctgaaccgctcactgctgcagcactgcaaacccttccgaggggccaccaagggctgccttcgggccctggccatgaagttcaagaccacacatgcaccgccaggggacacactggtgcatgctggggacctgctcaccgccctgtacttcatctcccggggctccatcgagatcctgcggggcgacgtcgtcgtggccatcctggggaagaatgacatctttggggagcctctgaacctgtatgcaaggcctggcaagtcgaacggggatgtgcgggccctcacctactgtgacctacacaagatccatcgggacgacctgctggaggtgctggacatgtaccctgagttctccgaccacttctggtccagcctggagatcaccttcaacctgcgagataccaacatgatcccgggctcccccggcagtacggagttagagggtggcttcagtcggcaacgcaagcgcaagttgtccttccgcaggcgcacggacaaggacacggagcagccaggggaggtgtcggccttggggccgggccgggcgggggcagggccgagtagccggggccggccgggggggccgtggggggagagcccgtccagtggcccctccagccctgagagcagtgaggatgagggcccaggccgcagctccagccccctccgcctggtgcccttctccagccccaggccccccggagagccgccgggtggggagcccctgatggaggactgcgagaagagcagcgacacttgcaaccccctgtcaggcgccttctcaggagtgtccaacattttcagcttctggggggacagtcggggccgccagtaccaggagctccctcgatgccccgcccccacccccagcctcctcaacatccccctctccagcccgggtcggcggccccggggcgacgtggagagcaggctggatgccctccagcgccagctcaacaggctggagacccggctgagtgcagacatggccactgtcctgcagctgctacagaggcagatgacgctggtcccgcccgcctacagtgctgtgaccaccccggggcctggccccacttccacatccccgctgttgaccgtcagccccctccccaccctcaccttggactcgctttctcaggtttcccagttcatggcgtgtgaggagctgcccccgggggccccagagcttccccaagaaggccccacacgacgcctctccctaccgggccagctgggggccctcacctcccagcccctgcacagacacggctcggacccgggcagttagtggggctgcccagtgtggacacgtggctcacccagggatcaaggcgctgctgggccgctccccttggaggccctgctcaggaggccctgaccgtggaaggggagaggaactcgaaagcacagctcctcccccagcccttgggaccatcttctcctgcagtcccctgggccccagtgagaggggcaggggcagggccggcagtaggtggggcctgtggtccccccactgccctgagggcattagctggtctaactgcccggaggcacccggccctgggccttaggcacctcaaggacttttctgctatttactgctcttattgttaaggataataattaaggatcatatgaataattaatgaagatgctgatgactatgaataataaataattatcctgaggaga

SEQ ID NO: 819 - DNA, 3884 bp, Homo sapiens
  source 1..3884: mol_type = genomic DNA
  misc_feature 1..3884: note = cDNA of KCNH2 gene SNP c.3286C>T (p.Pro1096Ser)
atgccggtgcggaggggccacgtcgcgccgcagaacaccttcctggacaccatcatccgcaagtttgagggccagagccgtaagttcatcatcgccaacgctcgggtggagaactgcgccgtcatctactgcaacgacggcttctgcgagctgtgcggctactcgcgggccgaggtgatgcagcgaccctgcacctgcgacttcctgcacgggccgcgcacgcagcgccgcgctgccgcgcagatcgcgcaggcactgctgggcgccgaggagcgcaaagtggaaatcgccttctaccggaaagatgggagctgcttcctatgtctggtggatgtggtgcccgtgaagaacgaggatggggctgtcatcatgttcatcctcaatttcgaggtggtgatggagaaggacatggtggggtccccggctcatgacaccaaccaccggggcccccccaccagctggctggccccaggccgcgccaagaccttccgcctgaagctgcccgcgctgctggcgctgacggcccgggagtcgtcggtgcggtcgggcggcgcgggcggcgcgggcgccccgggggccgtggtggtggacgtggacctgacgcccgcggcacccagcagcgagtcgctggccctggacgaagtgacagccatggacaaccacgtggcagggctcgggcccgcggaggagcggcgtgcgctggtgggtcccggctctccgccccgcagcgcgcccggccagctcccatcgccccgggcgcacagcctcaaccccgacgcctcgggctccagctgcagcctggcccggacgcgctcccgagaaagctgcgccagcgtgcgccgcgcctcgtcggccgacgacatcgaggccatgcgcgccggggtgctgcccccgccaccgcgccacgccagcaccggggccatgcacccactgcgcagcggcttgctcaactccacctcggactccgacctcgtgcgctaccgcaccattagcaagattccccaaatcaccctcaactttgtggacctcaagggcgaccccttcttggcttcgcccaccagtgaccgtgagatcatagcacctaagataaaggagcgaacccacaatgtcactgagaaggtcacccaggtcctgtccctgggcgccgacgtgctgcctgagtacaagctgcaggcaccgcgcatccaccgctggaccatcctgcattacagccccttcaaggccgtgtgggactggctcatcctgctgctggtcatctacacggctgtcttcacaccctactcggctgccttcctgctgaaggagacggaagaaggcccgcctgctaccgagtgtggctacgcctgccagccgctggctgtggtggacctcatcgtggacatcatgttcattgtggacatcctcatcaacttccgcaccacctacgtcaatgccaacgaggaggtggtcagccaccccggccgcatcgccgtccactacttcaagggctggttcctcatcgacatggtggccgccatccccttcgacctgctcatcttcggctctggctctgaggagctgatcgggctgctgaagactgcgcggctgctgcggctggtgcgcgtggcgcggaagctggatcgctactcagagtacggcgcggccgtgctgttcttgctcatgtgcacctttgcgctcatcgcgcactggctagcctgcatctggtacgccatcggcaacatggagcagccacacatggactcacgcatcggctggctgcacaacctgggcgaccagataggcaaaccctacaacagcagcggcctgggcggcccctccatcaaggacaagtatgtgacggcgctctacttcaccttcagcagcctcaccagtgtgggcttcggcaacgtctctcccaacaccaactcagagaagatcttctccatctgcgtcatgctcattggctccctcatgtatgctagcatcttcggcaacgtgtcggccatcatccagcggctgtactcgggcacagcccgctaccacacacagatgctgcgggtgcgggagttcatccgcttccaccagatccccaatcccctgcgccagcgcctcgaggagtacttccagcacgcctggtcctacaccaacggcatcgacatgaacgcggtgctgaagggcttccctgagtgcctgcaggctgacatctgcctgcacctgaaccgctcactgctgcagcactgcaaacccttccgaggggccaccaagggctgccttcgggccctggccatgaagttcaagaccacacatgcaccgccaggggacacactggtgcatgctggggacctgctcaccgccctgtacttcatctcccggggctccatcgagatcctgcggggcgacgtcgtcgtggccatcctggggaagaatgacatctttggggagcctctgaacctgtatgcaaggcctggcaagtcgaacggggatgtgcgggccctcacctactgtgacctacacaagatccatcgggacgacctgctggaggtgctggacatgtaccctgagttctccgaccacttctggtccagcctggagatcaccttcaacctgcgagataccaacatgatcccgggctcccccggcagtacggagttagagggtggcttcagtcggcaacgcaagcgcaagttgtccttccgcaggcgcacggacaaggacacggagcagccaggggaggtgtcggccttggggccgggccgggcgggggcagggccgagtagccggggccggccgggggggccgtggggggagagcccgtccagtggcccctccagccctgagagcagtgaggatgagggcccaggccgcagctccagccccctccgcctggtgcccttctccagccccaggccccccggagagccgccgggtggggagcccctgatggaggactgcgagaagagcagcgacacttgcaaccccctgtcaggcgccttctcaggagtgtccaacattttcagcttctggggggacagtcggggccgccagtaccaggagctccctcgatgccccgcccccacccccagcctcctcaacatccccctctccagcccgggtcggcggccccggggcgacgtggagagcaggctggatgccctccagcgccagctcaacaggctggagacccggctgagtgcagacatggccactgtcctgcagctgctacagaggcagatgacgctggtcccgcccgcctacagtgctgtgaccaccccggggcctggccccacttccacatccccgctgttgtccgtcagccccctccccaccctcaccttggactcgctttctcaggtttcccagttcatggcgtgtgaggagctgcccccgggggccccagagcttccccaagaaggccccacacgacgcctctccctaccgggccagctgggggccctcacctcccagcccctgcacagacacggctcggacccgggcagttagtggggctgcccagtgtggacacgtggctcacccagggatcaaggcgctgctgggccgctccccttggaggccctgctcaggaggccctgaccgtggaaggggagaggaactcgaaagcacagctcctcccccagcccttgggaccatcttctcctgcagtcccctgggccccagtgagaggggcaggggcagggccggcagtaggtggggcctgtggtccccccactgccctgagggcattagctggtctaactgcccggaggcacccggccctgggccttaggcacctcaaggacttttctgctatttactgctcttattgttaaggataataattaaggatcatatgaataattaatgaagatgctgatgactatgaataataaataattatcctgaggaga

SEQ ID NO: 820 - DNA, 3884 bp, Homo sapiens
  source 1..3884: mol_type = genomic DNA
  misc_feature 1..3884: note = cDNA of KCNH2 gene SNP c.3289G>A (p.Val1097Ile)
atgccggtgcggaggggccacgtcgcgccgcagaacaccttcctggacaccatcatccgcaagtttgagggccagagccgtaagttcatcatcgccaacgctcgggtggagaactgcgccgtcatctactgcaacgacggcttctgcgagctgtgcggctactcgcgggccgaggtgatgcagcgaccctgcacctgcgacttcctgcacgggccgcgcacgcagcgccgcgctgccgcgcagatcgcgcaggcactgctgggcgccgaggagcgcaaagtggaaatcgccttctaccggaaagatgggagctgcttcctatgtctggtggatgtggtgcccgtgaagaacgaggatggggctgtcatcatgttcatcctcaatttcgaggtggtgatggagaaggacatggtggggtccccggctcatgacaccaaccaccggggcccccccaccagctggctggccccaggccgcgccaagaccttccgcctgaagctgcccgcgctgctggcgctgacggcccgggagtcgtcggtgcggtcgggcggcgcgggcggcgcgggcgccccgggggccgtggtggtggacgtggacctgacgcccgcggcacccagcagcgagtcgctggccctggacgaagtgacagccatggacaaccacgtggcagggctcgggcccgcggaggagcggcgtgcgctggtgggtcccggctctccgccccgcagcgcgcccggccagctcccatcgccccgggcgcacagcctcaaccccgacgcctcgggctccagctgcagcctggcccggacgcgctcccgagaaagctgcgccagcgtgcgccgcgcctcgtcggccgacgacatcgaggccatgcgcgccggggtgctgcccccgccaccgcgccacgccagcaccggggccatgcacccactgcgcagcggcttgctcaactccacctcggactccgacctcgtgcgctaccgcaccattagcaagattccccaaatcaccctcaactttgtggacctcaagggcgaccccttcttggcttcgcccaccagtgaccgtgagatcatagcacctaagataaaggagcgaacccacaatgtcactgagaaggtcacccaggtcctgtccctgggcgccgacgtgctgcctgagtacaagctgcaggcaccgcgcatccaccgctggaccatcctgcattacagccccttcaaggccgtgtgggactggctcatcctgctgctggtcatctacacggctgtcttcacaccctactcggctgccttcctgctgaaggagacggaagaaggcccgcctgctaccgagtgtggctacgcctgccagccgctggctgtggtggacctcatcgtggacatcatgttcattgtggacatcctcatcaacttccgcaccacctacgtcaatgccaacgaggaggtggtcagccaccccggccgcatcgccgtccactacttcaagggctggttcctcatcgacatggtggccgccatccccttcgacctgctcatcttcggctctggctctgaggagctgatcgggctgctgaagactgcgcggctgctgcggctggtgcgcgtggcgcggaagctggatcgctactcagagtacggcgcggccgtgctgttcttgctcatgtgcacctttgcgctcatcgcgcactggctagcctgcatctggtacgccatcggcaacatggagcagccacacatggactcacgcatcggctggctgcacaacctgggcgaccagataggcaaaccctacaacagcagcggcctgggcggcccctccatcaaggacaagtatgtgacggcgctctacttcaccttcagcagcctcaccagtgtgggcttcggcaacgtctctcccaacaccaactcagagaagatcttctccatctgcgtcatgctcattggctccctcatgtatgctagcatcttcggcaacgtgtcggccatcatccagcggctgtactcgggcacagcccgctaccacacacagatgctgcgggtgcgggagttcatccgcttccaccagatccccaatcccctgcgccagcgcctcgaggagtacttccagcacgcctggtcctacaccaacggcatcgacatgaacgcggtgctgaagggcttccctgagtgcctgcaggctgacatctgcctgcacctgaaccgctcactgctgcagcactgcaaacccttccgaggggccaccaagggctgccttcgggccctggccatgaagttcaagaccacacatgcaccgccaggggacacactggtgcatgctggggacctgctcaccgccctgtacttcatctcccggggctccatcgagatcctgcggggcgacgtcgtcgtggccatcctggggaagaatgacatctttggggagcctctgaacctgtatgcaaggcctggcaagtcgaacggggatgtgcgggccctcacctactgtgacctacacaagatccatcgggacgacctgctggaggtgctggacatgtaccctgagttctccgaccacttctggtccagcctggagatcaccttcaacctgcgagataccaacatgatcccgggctcccccggcagtacggagttagagggtggcttcagtcggcaacgcaagcgcaagttgtccttccgcaggcgcacggacaaggacacggagcagccaggggaggtgtcggccttggggccgggccgggcgggggcagggccgagtagccggggccggccgggggggccgtggggggagagcccgtccagtggcccctccagccctgagagcagtgaggatgagggcccaggccgcagctccagccccctccgcctggtgcccttctccagccccaggccccccggagagccgccgggtggggagcccctgatggaggactgcgagaagagcagcgacacttgcaaccccctgtcaggcgccttctcaggagtgtccaacattttcagcttctggggggacagtcggggccgccagtaccaggagctccctcgatgccccgcccccacccccagcctcctcaacatccccctctccagcccgggtcggcggccccggggcgacgtggagagcaggctggatgccctccagcgccagctcaacaggctggagacccggctgagtgcagacatggccactgtcctgcagctgctacagaggcagatgacgctggtcccgcccgcctacagtgctgtgaccaccccggggcctggccccacttccacatccccgctgttgcccatcagccccctccccaccctcaccttggactcgctttctcaggtttcccagttcatggcgtgtgaggagctgcccccgggggccccagagcttccccaagaaggccccacacgacgcctctccctaccgggccagctgggggccctcacctcccagcccctgcacagacacggctcggacccgggcagttagtggggctgcccagtgtggacacgtggctcacccagggatcaaggcgctgctgggccgctccccttggaggccctgctcaggaggccctgaccgtggaaggggagaggaactcgaaagcacagctcctcccccagcccttgggaccatcttctcctgcagtcccctgggccccagtgagaggggcaggggcagggccggcagtaggtggggcctgtggtccccccactgccctgagggcattagctggtctaactgcccggaggcacccggccctgggccttaggcacctcaaggacttttctgctatttactgctcttattgttaaggataataattaaggatcatatgaataattaatgaagatgctgatgactatgaataataaataattatcctgaggaga

SEQ ID NO: 821 - DNA, 3884 bp, Homo sapiens
  source 1..3884: mol_type = genomic DNA
  misc_feature 1..3884: note = cDNA of KCNH2 gene SNP c.3292A>C (p.Ser1098Arg)
atgccggtgcggaggggccacgtcgcgccgcagaacaccttcctggacaccatcatccgcaagtttgagggccagagccgtaagttcatcatcgccaacgctcgggtggagaactgcgccgtcatctactgcaacgacggcttctgcgagctgtgcggctactcgcgggccgaggtgatgcagcgaccctgcacctgcgacttcctgcacgggccgcgcacgcagcgccgcgctgccgcgcagatcgcgcaggcactgctgggcgccgaggagcgcaaagtggaaatcgccttctaccggaaagatgggagctgcttcctatgtctggtggatgtggtgcccgtgaagaacgaggatggggctgtcatcatgttcatcctcaatttcgaggtggtgatggagaaggacatggtggggtccccggctcatgacaccaaccaccggggcccccccaccagctggctggccccaggccgcgccaagaccttccgcctgaagctgcccgcgctgctggcgctgacggcccgggagtcgtcggtgcggtcgggcggcgcgggcggcgcgggcgccccgggggccgtggtggtggacgtggacctgacgcccgcggcacccagcagcgagtcgctggccctggacgaagtgacagccatggacaaccacgtggcagggctcgggcccgcggaggagcggcgtgcgctggtgggtcccggctctccgccccgcagcgcgcccggccagctcccatcgccccgggcgcacagcctcaaccccgacgcctcgggctccagctgcagcctggcccggacgcgctcccgagaaagctgcgccagcgtgcgccgcgcctcgtcggccgacgacatcgaggccatgcgcgccggggtgctgcccccgccaccgcgccacgccagcaccggggccatgcacccactgcgcagcggcttgctcaactccacctcggactccgacctcgtgcgctaccgcaccattagcaagattccccaaatcaccctcaactttgtggacctcaagggcgaccccttcttggcttcgcccaccagtgaccgtgagatcatagcacctaagataaaggagcgaacccacaatgtcactgagaaggtcacccaggtcctgtccctgggcgccgacgtgctgcctgagtacaagctgcaggcaccgcgcatccaccgctggaccatcctgcattacagccccttcaaggccgtgtgggactggctcatcctgctgctggtcatctacacggctgtcttcacaccctactcggctgccttcctgctgaaggagacggaagaaggcccgcctgctaccgagtgtggctacgcctgccagccgctggctgtggtggacctcatcgtggacatcatgttcattgtggacatcctcatcaacttccgcaccacctacgtcaatgccaacgaggaggtggtcagccaccccggccgcatcgccgtccactacttcaagggctggttcctcatcgacatggtggccgccatccccttcgacctgctcatcttcggctctggctctgaggagctgatcgggctgctgaagactgcgcggctgctgcggctggtgcgcgtggcgcggaagctggatcgctactcagagtacggcgcggccgtgctgttcttgctcatgtgcacctttgcgctcatcgcgcactggctagcctgcatctggtacgccatcggcaacatggagcagccacacatggactcacgcatcggctggctgcacaacctgggcgaccagataggcaaaccctacaacagcagcggcctgggcggcccctccatcaaggacaagtatgtgacggcgctctacttcaccttcagcagcctcaccagtgtgggcttcggcaacgtctctcccaacaccaactcagagaagatcttctccatctgcgtcatgctcattggctccctcatgtatgctagcatcttcggcaacgtgtcggccatcatccagcggctgtactcgggcacagcccgctaccacacacagatgctgcgggtgcgggagttcatccgcttccaccagatccccaatcccctgcgccagcgcctcgaggagtacttccagcacgcctggtcctacaccaacggcatcgacatgaacgcggtgctgaagggcttccctgagtgcctgcaggctgacatctgcctgcacctgaaccgctcactgctgcagcactgcaaacccttccgaggggccaccaagggctgccttcgggccctggccatgaagttcaagaccacacatgcaccgccaggggacacactggtgcatgctggggacctgctcaccgccctgtacttcatctcccggggctccatcgagatcctgcggggcgacgtcgtcgtggccatcctggggaagaatgacatctttggggagcctctgaacctgtatgcaaggcctggcaagtcgaacggggatgtgcgggccctcacctactgtgacctacacaagatccatcgggacgacctgctggaggtgctggacatgtaccctgagttctccgaccacttctggtccagcctggagatcaccttcaacctgcgagataccaacatgatcccgggctcccccggcagtacggagttagagggtggcttcagtcggcaacgcaagcgcaagttgtccttccgcaggcgcacggacaaggacacggagcagccaggggaggtgtcggccttggggccgggccgggcgggggcagggccgagtagccggggccggccgggggggccgtggggggagagcccgtccagtggcccctccagccctgagagcagtgaggatgagggcccaggccgcagctccagccccctccgcctggtgcccttctccagccccaggccccccggagagccgccgggtggggagcccctgatggaggactgcgagaagagcagcgacacttgcaaccccctgtcaggcgccttctcaggagtgtccaacattttcagcttctggggggacagtcggggccgccagtaccaggagctccctcgatgccccgcccccacccccagcctcctcaacatccccctctccagcccgggtcggcggccccggggcgacgtggagagcaggctggatgccctccagcgccagctcaacaggctggagacccggctgagtgcagacatggccactgtcctgcagctgctacagaggcagatgacgctggtcccgcccgcctacagtgctgtgaccaccccggggcctggccccacttccacatccccgctgttgcccgtccgccccctccccaccctcaccttggactcgctttctcaggtttcccagttcatggcgtgtgaggagctgcccccgggggccccagagcttccccaagaaggccccacacgacgcctctccctaccgggccagctgggggccctcacctcccagcccctgcacagacacggctcggacccgggcagttagtggggctgcccagtgtggacacgtggctcacccagggatcaaggcgctgctgggccgctccccttggaggccctgctcaggaggccctgaccgtggaaggggagaggaactcgaaagcacagctcctcccccagcccttgggaccatcttctcctgcagtcccctgggccccagtgagaggggcaggggcagggccggcagtaggtggggcctgtggtccccccactgccctgagggcattagctggtctaactgcccggaggcacccggccctgggccttaggcacctcaaggacttttctgctatttactgctcttattgttaaggataataattaaggatcatatgaataattaatgaagatgctgatgactatgaataataaataattatcctgaggaga

SEQ ID NO: 822 - DNA, 3884 bp, Homo sapiens
  source 1..3884: mol_type = genomic DNA
  misc_feature 1..3884: note = cDNA of KCNH2 gene SNP c.3294C>G (p.Ser1098Arg)
atgccggtgcggaggggccacgtcgcgccgcagaacaccttcctggacaccatcatccgcaagtttgagggccagagccgtaagttcatcatcgccaacgctcgggtggagaactgcgccgtcatctactgcaacgacggcttctgcgagctgtgcggctactcgcgggccgaggtgatgcagcgaccctgcacctgcgacttcctgcacgggccgcgcacgcagcgccgcgctgccgcgcagatcgcgcaggcactgctgggcgccgaggagcgcaaagtggaaatcgccttctaccggaaagatgggagctgcttcctatgtctggtggatgtggtgcccgtgaagaacgaggatggggctgtcatcatgttcatcctcaatttcgaggtggtgatggagaaggacatggtggggtccccggctcatgacaccaaccaccggggcccccccaccagctggctggccccaggccgcgccaagaccttccgcctgaagctgcccgcgctgctggcgctgacggcccgggagtcgtcggtgcggtcgggcggcgcgggcggcgcgggcgccccgggggccgtggtggtggacgtggacctgacgcccgcggcacccagcagcgagtcgctggccctggacgaagtgacagccatggacaaccacgtggcagggctcgggcccgcggaggagcggcgtgcgctggtgggtcccggctctccgccccgcagcgcgcccggccagctcccatcgccccgggcgcacagcctcaaccccgacgcctcgggctccagctgcagcctggcccggacgcgctcccgagaaagctgcgccagcgtgcgccgcgcctcgtcggccgacgacatcgaggccatgcgcgccggggtgctgcccccgccaccgcgccacgccagcaccggggccatgcacccactgcgcagcggcttgctcaactccacctcggactccgacctcgtgcgctaccgcaccattagcaagattccccaaatcaccctcaactttgtggacctcaagggcgaccccttcttggcttcgcccaccagtgaccgtgagatcatagcacctaagataaaggagcgaacccacaatgtcactgagaaggtcacccaggtcctgtccctgggcgccgacgtgctgcctgagtacaagctgcaggcaccgcgcatccaccgctggaccatcctgcattacagccccttcaaggccgtgtgggactggctcatcctgctgctggtcatctacacggctgtcttcacaccctactcggctgccttcctgctgaaggagacggaagaaggcccgcctgctaccgagtgtggctacgcctgccagccgctggctgtggtggacctcatcgtggacatcatgttcattgtggacatcctcatcaacttccgcaccacctacgtcaatgccaacgaggaggtggtcagccaccccggccgcatcgccgtccactacttcaagggctggttcctcatcgacatggtggccgccatccccttcgacctgctcatcttcggctctggctctgaggagctgatcgggctgctgaagactgcgcggctgctgcggctggtgcgcgtggcgcggaagctggatcgctactcagagtacggcgcggccgtgctgttcttgctcatgtgcacctttgcgctcatcgcgcactggctagcctgcatctggtacgccatcggcaacatggagcagccacacatggactcacgcatcggctggctgcacaacctgggcgaccagataggcaaaccctacaacagcagcggcctgggcggcccctccatcaaggacaagtatgtgacggcgctctacttcaccttcagcagcctcaccagtgtgggcttcggcaacgtctctcccaacaccaactcagagaagatcttctccatctgcgtcatgctcattggctccctcatgtatgctagcatcttcggcaacgtgtcggccatcatccagcggctgtactcgggcacagcccgctaccacacacagatgctgcgggtgcgggagttcatccgcttccaccagatccccaatcccctgcgccagcgcctcgaggagtacttccagcacgcctggtcctacaccaacggcatcgacatgaacgcggtgctgaagggcttccctgagtgcctgcaggctgacatctgcctgcacctgaaccgctcactgctgcagcactgcaaacccttccgaggggccaccaagggctgccttcgggccctggccatgaagttcaagaccacacatgcaccgccaggggacacactggtgcatgctggggacctgctcaccgccctgtacttcatctcccggggctccatcgagatcctgcggggcgacgtcgtcgtggccatcctggggaagaatgacatctttggggagcctctgaacctgtatgcaaggcctggcaagtcgaacggggatgtgcgggccctcacctactgtgacctacacaagatccatcgggacgacctgctggaggtgctggacatgtaccctgagttctccgaccacttctggtccagcctggagatcaccttcaacctgcgagataccaacatgatcccgggctcccccggcagtacggagttagagggtggcttcagtcggcaacgcaagcgcaagttgtccttccgcaggcgcacggacaaggacacggagcagccaggggaggtgtcggccttggggccgggccgggcgggggcagggccgagtagccggggccggccgggggggccgtggggggagagcccgtccagtggcccctccagccctgagagcagtgaggatgagggcccaggccgcagctccagccccctccgcctggtgcccttctccagccccaggccccccggagagccgccgggtggggagcccctgatggaggactgcgagaagagcagcgacacttgcaaccccctgtcaggcgccttctcaggagtgtccaacattttcagcttctggggggacagtcggggccgccagtaccaggagctccctcgatgccccgcccccacccccagcctcctcaacatccccctctccagcccgggtcggcggccccggggcgacgtggagagcaggctggatgccctccagcgccagctcaacaggctggagacccggctgagtgcagacatggccactgtcctgcagctgctacagaggcagatgacgctggtcccgcccgcctacagtgctgtgaccaccccggggcctggccccacttccacatccccgctgttgcccgtcaggcccctccccaccctcaccttggactcgctttctcaggtttcccagttcatggcgtgtgaggagctgcccccgggggccccagagcttccccaagaaggccccacacgacgcctctccctaccgggccagctgggggccctcacctcccagcccctgcacagacacggctcggacccgggcagttagtggggctgcccagtgtggacacgtggctcacccagggatcaaggcgctgctgggccgctccccttggaggccctgctcaggaggccctgaccgtggaaggggagaggaactcgaaagcacagctcctcccccagcccttgggaccatcttctcctgcagtcccctgggccccagtgagaggggcaggggcagggccggcagtaggtggggcctgtggtccccccactgccctgagggcattagctggtctaactgcccggaggcacccggccctgggccttaggcacctcaaggacttttctgctatttactgctcttattgttaaggataataattaaggatcatatgaataattaatgaagatgctgatgactatgaataataaataattatcctgaggaga

SEQ ID NO: 823 - DNA, 3884 bp, Homo sapiens
  source 1..3884: mol_type = genomic DNA
  misc_feature 1..3884: note = cDNA of KCNH2 gene SNP c.3296C>T (p.Pro1099Leu)
atgccggtgcggaggggccacgtcgcgccgcagaacaccttcctggacaccatcatccgcaagtttgagggccagagccgtaagttcatcatcgccaacgctcgggtggagaactgcgccgtcatctactgcaacgacggcttctgcgagctgtgcggctactcgcgggccgaggtgatgcagcgaccctgcacctgcgacttcctgcacgggccgcgcacgcagcgccgcgctgccgcgcagatcgcgcaggcactgctgggcgccgaggagcgcaaagtggaaatcgccttctaccggaaagatgggagctgcttcctatgtctggtggatgtggtgcccgtgaagaacgaggatggggctgtcatcatgttcatcctcaatttcgaggtggtgatggagaaggacatggtggggtccccggctcatgacaccaaccaccggggcccccccaccagctggctggccccaggccgcgccaagaccttccgcctgaagctgcccgcgctgctggcgctgacggcccgggagtcgtcggtgcggtcgggcggcgcgggcggcgcgggcgccccgggggccgtggtggtggacgtggacctgacgcccgcggcacccagcagcgagtcgctggccctggacgaagtgacagccatggacaaccacgtggcagggctcgggcccgcggaggagcggcgtgcgctggtgggtcccggctctccgccccgcagcgcgcccggccagctcccatcgccccgggcgcacagcctcaaccccgacgcctcgggctccagctgcagcctggcccggacgcgctcccgagaaagctgcgccagcgtgcgccgcgcctcgtcggccgacgacatcgaggccatgcgcgccggggtgctgcccccgccaccgcgccacgccagcaccggggccatgcacccactgcgcagcggcttgctcaactccacctcggactccgacctcgtgcgctaccgcaccattagcaagattccccaaatcaccctcaactttgtggacctcaagggcgaccccttcttggcttcgcccaccagtgaccgtgagatcatagcacctaagataaaggagcgaacccacaatgtcactgagaaggtcacccaggtcctgtccctgggcgccgacgtgctgcctgagtacaagctgcaggcaccgcgcatccaccgctggaccatcctgcattacagccccttcaaggccgtgtgggactggctcatcctgctgctggtcatctacacggctgtcttcacaccctactcggctgccttcctgctgaaggagacggaagaaggcccgcctgctaccgagtgtggctacgcctgccagccgctggctgtggtggacctcatcgtggacatcatgttcattgtggacatcctcatcaacttccgcaccacctacgtcaatgccaacgaggaggtggtcagccaccccggccgcatcgccgtccactacttcaagggctggttcctcatcgacatggtggccgccatccccttcgacctgctcatcttcggctctggctctgaggagctgatcgggctgctgaagactgcgcggctgctgcggctggtgcgcgtggcgcggaagctggatcgctactcagagtacggcgcggccgtgctgttcttgctcatgtgcacctttgcgctcatcgcgcactggctagcctgcatctggtacgccatcggcaacatggagcagccacacatggactcacgcatcggctggctgcacaacctgggcgaccagataggcaaaccctacaacagcagcggcctgggcggcccctccatcaaggacaagtatgtgacggcgctctacttcaccttcagcagcctcaccagtgtgggcttcggcaacgtctctcccaacaccaactcagagaagatcttctccatctgcgtcatgctcattggctccctcatgtatgctagcatcttcggcaacgtgtcggccatcatccagcggctgtactcgggcacagcccgctaccacacacagatgctgcgggtgcgggagttcatccgcttccaccagatccccaatcccctgcgccagcgcctcgaggagtacttccagcacgcctggtcctacaccaacggcatcgacatgaacgcggtgctgaagggcttccctgagtgcctgcaggctgacatctgcctgcacctgaaccgctcactgctgcagcactgcaaacccttccgaggggccaccaagggctgccttcgggccctggccatgaagttcaagaccacacatgcaccgccaggggacacactggtgcatgctggggacctgctcaccgccctgtacttcatctcccggggctccatcgagatcctgcggggcgacgtcgtcgtggccatcctggggaagaatgacatctttggggagcctctgaacctgtatgcaaggcctggcaagtcgaacggggatgtgcgggccctcacctactgtgacctacacaagatccatcgggacgacctgctggaggtgctggacatgtaccctgagttctccgaccacttctggtccagcctggagatcaccttcaacctgcgagataccaacatgatcccgggctcccccggcagtacggagttagagggtggcttcagtcggcaacgcaagcgcaagttgtccttccgcaggcgcacggacaaggacacggagcagccaggggaggtgtcggccttggggccgggccgggcgggggcagggccgagtagccggggccggccgggggggccgtggggggagagcccgtccagtggcccctccagccctgagagcagtgaggatgagggcccaggccgcagctccagccccctccgcctggtgcccttctccagccccaggccccccggagagccgccgggtggggagcccctgatggaggactgcgagaagagcagcgacacttgcaaccccctgtcaggcgccttctcaggagtgtccaacattttcagcttctggggggacagtcggggccgccagtaccaggagctccctcgatgccccgcccccacccccagcctcctcaacatccccctctccagcccgggtcggcggccccggggcgacgtggagagcaggctggatgccctccagcgccagctcaacaggctggagacccggctgagtgcagacatggccactgtcctgcagctgctacagaggcagatgacgctggtcccgcccgcctacagtgctgtgaccaccccggggcctggccccacttccacatccccgctgttgcccgtcagcctcctccccaccctcaccttggactcgctttctcaggtttcccagttcatggcgtgtgaggagctgcccccgggggccccagagcttccccaagaaggccccacacgacgcctctccctaccgggccagctgggggccctcacctcccagcccctgcacagacacggctcggacccgggcagttagtggggctgcccagtgtggacacgtggctcacccagggatcaaggcgctgctgggccgctccccttggaggccctgctcaggaggccctgaccgtggaaggggagaggaactcgaaagcacagctcctcccccagcccttgggaccatcttctcctgcagtcccctgggccccagtgagaggggcaggggcagggccggcagtaggtggggcctgtggtccccccactgccctgagggcattagctggtctaactgcccggaggcacccggccctgggccttaggcacctcaaggacttttctgctatttactgctcttattgttaaggataataattaaggatcatatgaataattaatgaagatgctgatgactatgaataataaataattatcctgaggaga

SEQ ID NO: 824 - DNA, 3884 bp, Homo sapiens
  source 1..3884: mol_type = genomic DNA
  misc_feature 1..3884: note = cDNA of KCNH2 gene SNP c.32A>G (p.Gln11Arg)
atgccggtgcggaggggccacgtcgcgccgcggaacaccttcctggacaccatcatccgcaagtttgagggccagagccgtaagttcatcatcgccaacgctcgggtggagaactgcgccgtcatctactgcaacgacggcttctgcgagctgtgcggctactcgcgggccgaggtgatgcagcgaccctgcacctgcgacttcctgcacgggccgcgcacgcagcgccgcgctgccgcgcagatcgcgcaggcactgctgggcgccgaggagcgcaaagtggaaatcgccttctaccggaaagatgggagctgcttcctatgtctggtggatgtggtgcccgtgaagaacgaggatggggctgtcatcatgttcatcctcaatttcgaggtggtgatggagaaggacatggtggggtccccggctcatgacaccaaccaccggggcccccccaccagctggctggccccaggccgcgccaagaccttccgcctgaagctgcccgcgctgctggcgctgacggcccgggagtcgtcggtgcggtcgggcggcgcgggcggcgcgggcgccccgggggccgtggtggtggacgtggacctgacgcccgcggcacccagcagcgagtcgctggccctggacgaagtgacagccatggacaaccacgtggcagggctcgggcccgcggaggagcggcgtgcgctggtgggtcccggctctccgccccgcagcgcgcccggccagctcccatcgccccgggcgcacagcctcaaccccgacgcctcgggctccagctgcagcctggcccggacgcgctcccgagaaagctgcgccagcgtgcgccgcgcctcgtcggccgacgacatcgaggccatgcgcgccggggtgctgcccccgccaccgcgccacgccagcaccggggccatgcacccactgcgcagcggcttgctcaactccacctcggactccgacctcgtgcgctaccgcaccattagcaagattccccaaatcaccctcaactttgtggacctcaagggcgaccccttcttggcttcgcccaccagtgaccgtgagatcatagcacctaagataaaggagcgaacccacaatgtcactgagaaggtcacccaggtcctgtccctgggcgccgacgtgctgcctgagtacaagctgcaggcaccgcgcatccaccgctggaccatcctgcattacagccccttcaaggccgtgtgggactggctcatcctgctgctggtcatctacacggctgtcttcacaccctactcggctgccttcctgctgaaggagacggaagaaggcccgcctgctaccgagtgtggctacgcctgccagccgctggctgtggtggacctcatcgtggacatcatgttcattgtggacatcctcatcaacttccgcaccacctacgtcaatgccaacgaggaggtggtcagccaccccggccgcatcgccgtccactacttcaagggctggttcctcatcgacatggtggccgccatccccttcgacctgctcatcttcggctctggctctgaggagctgatcgggctgctgaagactgcgcggctgctgcggctggtgcgcgtggcgcggaagctggatcgctactcagagtacggcgcggccgtgctgttcttgctcatgtgcacctttgcgctcatcgcgcactggctagcctgcatctggtacgccatcggcaacatggagcagccacacatggactcacgcatcggctggctgcacaacctgggcgaccagataggcaaaccctacaacagcagcggcctgggcggcccctccatcaaggacaagtatgtgacggcgctctacttcaccttcagcagcctcaccagtgtgggcttcggcaacgtctctcccaacaccaactcagagaagatcttctccatctgcgtcatgctcattggctccctcatgtatgctagcatcttcggcaacgtgtcggccatcatccagcggctgtactcgggcacagcccgctaccacacacagatgctgcgggtgcgggagttcatccgcttccaccagatccccaatcccctgcgccagcgcctcgaggagtacttccagcacgcctggtcctacaccaacggcatcgacatgaacgcggtgctgaagggcttccctgagtgcctgcaggctgacatctgcctgcacctgaaccgctcactgctgcagcactgcaaacccttccgaggggccaccaagggctgccttcgggccctggccatgaagttcaagaccacacatgcaccgccaggggacacactggtgcatgctggggacctgctcaccgccctgtacttcatctcccggggctccatcgagatcctgcggggcgacgtcgtcgtggccatcctggggaagaatgacatctttggggagcctctgaacctgtatgcaaggcctggcaagtcgaacggggatgtgcgggccctcacctactgtgacctacacaagatccatcgggacgacctgctggaggtgctggacatgtaccctgagttctccgaccacttctggtccagcctggagatcaccttcaacctgcgagataccaacatgatcccgggctcccccggcagtacggagttagagggtggcttcagtcggcaacgcaagcgcaagttgtccttccgcaggcgcacggacaaggacacggagcagccaggggaggtgtcggccttggggccgggccgggcgggggcagggccgagtagccggggccggccgggggggccgtggggggagagcccgtccagtggcccctccagccctgagagcagtgaggatgagggcccaggccgcagctccagccccctccgcctggtgcccttctccagccccaggccccccggagagccgccgggtggggagcccctgatggaggactgcgagaagagcagcgacacttgcaaccccctgtcaggcgccttctcaggagtgtccaacattttcagcttctggggggacagtcggggccgccagtaccaggagctccctcgatgccccgcccccacccccagcctcctcaacatccccctctccagcccgggtcggcggccccggggcgacgtggagagcaggctggatgccctccagcgccagctcaacaggctggagacccggctgagtgcagacatggccactgtcctgcagctgctacagaggcagatgacgctggtcccgcccgcctacagtgctgtgaccaccccggggcctggccccacttccacatccccgctgttgcccgtcagccccctccccaccctcaccttggactcgctttctcaggtttcccagttcatggcgtgtgaggagctgcccccgggggccccagagcttccccaagaaggccccacacgacgcctctccctaccgggccagctgggggccctcacctcccagcccctgcacagacacggctcggacccgggcagttagtggggctgcccagtgtggacacgtggctcacccagggatcaaggcgctgctgggccgctccccttggaggccctgctcaggaggccctgaccgtggaaggggagaggaactcgaaagcacagctcctcccccagcccttgggaccatcttctcctgcagtcccctgggccccagtgagaggggcaggggcagggccggcagtaggtggggcctgtggtccccccactgccctgagggcattagctggtctaactgcccggaggcacccggccctgggccttaggcacctcaaggacttttctgctatttactgctcttattgttaaggataataattaaggatcatatgaataattaatgaagatgctgatgactatgaataataaataattatcctgaggaga

SEQ ID NO: 825 - DNA, 3884 bp, Homo sapiens
  source 1..3884: mol_type = genomic DNA
  misc_feature 1..3884: note = cDNA of KCNH2 gene SNP c.3301C>T (p.Pro1101Ser)
atgccggtgcggaggggccacgtcgcgccgcagaacaccttcctggacaccatcatccgcaagtttgagggccagagccgtaagttcatcatcgccaacgctcgggtggagaactgcgccgtcatctactgcaacgacggcttctgcgagctgtgcggctactcgcgggccgaggtgatgcagcgaccctgcacctgcgacttcctgcacgggccgcgcacgcagcgccgcgctgccgcgcagatcgcgcaggcactgctgggcgccgaggagcgcaaagtggaaatcgccttctaccggaaagatgggagctgcttcctatgtctggtggatgtggtgcccgtgaagaacgaggatggggctgtcatcatgttcatcctcaatttcgaggtggtgatggagaaggacatggtggggtccccggctcatgacaccaaccaccggggcccccccaccagctggctggccccaggccgcgccaagaccttccgcctgaagctgcccgcgctgctggcgctgacggcccgggagtcgtcggtgcggtcgggcggcgcgggcggcgcgggcgccccgggggccgtggtggtggacgtggacctgacgcccgcggcacccagcagcgagtcgctggccctggacgaagtgacagccatggacaaccacgtggcagggctcgggcccgcggaggagcggcgtgcgctggtgggtcccggctctccgccccgcagcgcgcccggccagctcccatcgccccgggcgcacagcctcaaccccgacgcctcgggctccagctgcagcctggcccggacgcgctcccgagaaagctgcgccagcgtgcgccgcgcctcgtcggccgacgacatcgaggccatgcgcgccggggtgctgcccccgccaccgcgccacgccagcaccggggccatgcacccactgcgcagcggcttgctcaactccacctcggactccgacctcgtgcgctaccgcaccattagcaagattccccaaatcaccctcaactttgtggacctcaagggcgaccccttcttggcttcgcccaccagtgaccgtgagatcatagcacctaagataaaggagcgaacccacaatgtcactgagaaggtcacccaggtcctgtccctgggcgccgacgtgctgcctgagtacaagctgcaggcaccgcgcatccaccgctggaccatcctgcattacagccccttcaaggccgtgtgggactggctcatcctgctgctggtcatctacacggctgtcttcacaccctactcggctgccttcctgctgaaggagacggaagaaggcccgcctgctaccgagtgtggctacgcctgccagccgctggctgtggtggacctcatcgtggacatcatgttcattgtggacatcctcatcaacttccgcaccacctacgtcaatgccaacgaggaggtggtcagccaccccggccgcatcgccgtccactacttcaagggctggttcctcatcgacatggtggccgccatccccttcgacctgctcatcttcggctctggctctgaggagctgatcgggctgctgaagactgcgcggctgctgcggctggtgcgcgtggcgcggaagctggatcgctactcagagtacggcgcggccgtgctgttcttgctcatgtgcacctttgcgctcatcgcgcactggctagcctgcatctggtacgccatcggcaacatggagcagccacacatggactcacgcatcggctggctgcacaacctgggcgaccagataggcaaaccctacaacagcagcggcctgggcggcccctccatcaaggacaagtatgtgacggcgctctacttcaccttcagcagcctcaccagtgtgggcttcggcaacgtctctcccaacaccaactcagagaagatcttctccatctgcgtcatgctcattggctccctcatgtatgctagcatcttcggcaacgtgtcggccatcatccagcggctgtactcgggcacagcccgctaccacacacagatgctgcgggtgcgggagttcatccgcttccaccagatccccaatcccctgcgccagcgcctcgaggagtacttccagcacgcctggtcctacaccaacggcatcgacatgaacgcggtgctgaagggcttccctgagtgcctgcaggctgacatctgcctgcacctgaaccgctcactgctgcagcactgcaaacccttccgaggggccaccaagggctgccttcgggccctggccatgaagttcaagaccacacatgcaccgccaggggacacactggtgcatgctggggacctgctcaccgccctgtacttcatctcccggggctccatcgagatcctgcggggcgacgtcgtcgtggccatcctggggaagaatgacatctttggggagcctctgaacctgtatgcaaggcctggcaagtcgaacggggatgtgcgggccctcacctactgtgacctacacaagatccatcgggacgacctgctggaggtgctggacatgtaccctgagttctccgaccacttctggtccagcctggagatcaccttcaacctgcgagataccaacatgatcccgggctcccccggcagtacggagttagagggtggcttcagtcggcaacgcaagcgcaagttgtccttccgcaggcgcacggacaaggacacggagcagccaggggaggtgtcggccttggggccgggccgggcgggggcagggccgagtagccggggccggccgggggggccgtggggggagagcccgtccagtggcccctccagccctgagagcagtgaggatgagggcccaggccgcagctccagccccctccgcctggtgcccttctccagccccaggccccccggagagccgccgggtggggagcccctgatggaggactgcgagaagagcagcgacacttgcaaccccctgtcaggcgccttctcaggagtgtccaacattttcagcttctggggggacagtcggggccgccagtaccaggagctccctcgatgccccgcccccacccccagcctcctcaacatccccctctccagcccgggtcggcggccccggggcgacgtggagagcaggctggatgccctccagcgccagctcaacaggctggagacccggctgagtgcagacatggccactgtcctgcagctgctacagaggcagatgacgctggtcccgcccgcctacagtgctgtgaccaccccggggcctggccccacttccacatccccgctgttgcccgtcagccccctctccaccctcaccttggactcgctttctcaggtttcccagttcatggcgtgtgaggagctgcccccgggggccccagagcttccccaagaaggccccacacgacgcctctccctaccgggccagctgggggccctcacctcccagcccctgcacagacacggctcggacccgggcagttagtggggctgcccagtgtggacacgtggctcacccagggatcaaggcgctgctgggccgctccccttggaggccctgctcaggaggccctgaccgtggaaggggagaggaactcgaaagcacagctcctcccccagcccttgggaccatcttctcctgcagtcccctgggccccagtgagaggggcaggggcagggccggcagtaggtggggcctgtggtccccccactgccctgagggcattagctggtctaactgcccggaggcacccggccctgggccttaggcacctcaaggacttttctgctatttactgctcttattgttaaggataataattaaggatcatatgaataattaatgaagatgctgatgactatgaataataaataattatcctgaggaga

SEQ ID NO: 826 - DNA, 3884 bp, Homo sapiens
  source 1..3884: mol_type = genomic DNA
  misc_feature 1..3884: note = cDNA of KCNH2 gene SNP c.3302C>T (p.Pro1101Leu)
atgccggtgcggaggggccacgtcgcgccgcagaacaccttcctggacaccatcatccgcaagtttgagggccagagccgtaagttcatcatcgccaacgctcgggtggagaactgcgccgtcatctactgcaacgacggcttctgcgagctgtgcggctactcgcgggccgaggtgatgcagcgaccctgcacctgcgacttcctgcacgggccgcgcacgcagcgccgcgctgccgcgcagatcgcgcaggcactgctgggcgccgaggagcgcaaagtggaaatcgccttctaccggaaagatgggagctgcttcctatgtctggtggatgtggtgcccgtgaagaacgaggatggggctgtcatcatgttcatcctcaatttcgaggtggtgatggagaaggacatggtggggtccccggctcatgacaccaaccaccggggcccccccaccagctggctggccccaggccgcgccaagaccttccgcctgaagctgcccgcgctgctggcgctgacggcccgggagtcgtcggtgcggtcgggcggcgcgggcggcgcgggcgccccgggggccgtggtggtggacgtggacctgacgcccgcggcacccagcagcgagtcgctggccctggacgaagtgacagccatggacaaccacgtggcagggctcgggcccgcggaggagcggcgtgcgctggtgggtcccggctctccgccccgcagcgcgcccggccagctcccatcgccccgggcgcacagcctcaaccccgacgcctcgggctccagctgcagcctggcccggacgcgctcccgagaaagctgcgccagcgtgcgccgcgcctcgtcggccgacgacatcgaggccatgcgcgccggggtgctgcccccgccaccgcgccacgccagcaccggggccatgcacccactgcgcagcggcttgctcaactccacctcggactccgacctcgtgcgctaccgcaccattagcaagattccccaaatcaccctcaactttgtggacctcaagggcgaccccttcttggcttcgcccaccagtgaccgtgagatcatagcacctaagataaaggagcgaacccacaatgtcactgagaaggtcacccaggtcctgtccctgggcgccgacgtgctgcctgagtacaagctgcaggcaccgcgcatccaccgctggaccatcctgcattacagccccttcaaggccgtgtgggactggctcatcctgctgctggtcatctacacggctgtcttcacaccctactcggctgccttcctgctgaaggagacggaagaaggcccgcctgctaccgagtgtggctacgcctgccagccgctggctgtggtggacctcatcgtggacatcatgttcattgtggacatcctcatcaacttccgcaccacctacgtcaatgccaacgaggaggtggtcagccaccccggccgcatcgccgtccactacttcaagggctggttcctcatcgacatggtggccgccatccccttcgacctgctcatcttcggctctggctctgaggagctgatcgggctgctgaagactgcgcggctgctgcggctggtgcgcgtggcgcggaagctggatcgctactcagagtacggcgcggccgtgctgttcttgctcatgtgcacctttgcgctcatcgcgcactggctagcctgcatctggtacgccatcggcaacatggagcagccacacatggactcacgcatcggctggctgcacaacctgggcgaccagataggcaaaccctacaacagcagcggcctgggcggcccctccatcaaggacaagtatgtgacggcgctctacttcaccttcagcagcctcaccagtgtgggcttcggcaacgtctctcccaacaccaactcagagaagatcttctccatctgcgtcatgctcattggctccctcatgtatgctagcatcttcggcaacgtgtcggccatcatccagcggctgtactcgggcacagcccgctaccacacacagatgctgcgggtgcgggagttcatccgcttccaccagatccccaatcccctgcgccagcgcctcgaggagtacttccagcacgcctggtcctacaccaacggcatcgacatgaacgcggtgctgaagggcttccctgagtgcctgcaggctgacatctgcctgcacctgaaccgctcactgctgcagcactgcaaacccttccgaggggccaccaagggctgccttcgggccctggccatgaagttcaagaccacacatgcaccgccaggggacacactggtgcatgctggggacctgctcaccgccctgtacttcatctcccggggctccatcgagatcctgcggggcgacgtcgtcgtggccatcctggggaagaatgacatctttggggagcctctgaacctgtatgcaaggcctggcaagtcgaacggggatgtgcgggccctcacctactgtgacctacacaagatccatcgggacgacctgctggaggtgctggacatgtaccctgagttctccgaccacttctggtccagcctggagatcaccttcaacctgcgagataccaacatgatcccgggctcccccggcagtacggagttagagggtggcttcagtcggcaacgcaagcgcaagttgtccttccgcaggcgcacggacaaggacacggagcagccaggggaggtgtcggccttggggccgggccgggcgggggcagggccgagtagccggggccggccgggggggccgtggggggagagcccgtccagtggcccctccagccctgagagcagtgaggatgagggcccaggccgcagctccagccccctccgcctggtgcccttctccagccccaggccccccggagagccgccgggtggggagcccctgatggaggactgcgagaagagcagcgacacttgcaaccccctgtcaggcgccttctcaggagtgtccaacattttcagcttctggggggacagtcggggccgccagtaccaggagctccctcgatgccccgcccccacccccagcctcctcaacatccccctctccagcccgggtcggcggccccggggcgacgtggagagcaggctggatgccctccagcgccagctcaacaggctggagacccggctgagtgcagacatggccactgtcctgcagctgctacagaggcagatgacgctggtcccgcccgcctacagtgctgtgaccaccccggggcctggccccacttccacatccccgctgttgcccgtcagccccctcctcaccctcaccttggactcgctttctcaggtttcccagttcatggcgtgtgaggagctgcccccgggggccccagagcttccccaagaaggccccacacgacgcctctccctaccgggccagctgggggccctcacctcccagcccctgcacagacacggctcggacccgggcagttagtggggctgcccagtgtggacacgtggctcacccagggatcaaggcgctgctgggccgctccccttggaggccctgctcaggaggccctgaccgtggaaggggagaggaactcgaaagcacagctcctcccccagcccttgggaccatcttctcctgcagtcccctgggccccagtgagaggggcaggggcagggccggcagtaggtggggcctgtggtccccccactgccctgagggcattagctggtctaactgcccggaggcacccggccctgggccttaggcacctcaaggacttttctgctatttactgctcttattgttaaggataataattaaggatcatatgaataattaatgaagatgctgatgactatgaataataaataattatcctgaggaga

SEQ ID NO: 827 - DNA, 3884 bp, Homo sapiens
  source 1..3884: mol_type = genomic DNA
  misc_feature 1..3884: note = cDNA of KCNH2 gene SNP c.3305C>T (p.Thr1102Ile)
atgccggtgcggaggggccacgtcgcgccgcagaacaccttcctggacaccatcatccgcaagtttgagggccagagccgtaagttcatcatcgccaacgctcgggtggagaactgcgccgtcatctactgcaacgacggcttctgcgagctgtgcggctactcgcgggccgaggtgatgcagcgaccctgcacctgcgacttcctgcacgggccgcgcacgcagcgccgcgctgccgcgcagatcgcgcaggcactgctgggcgccgaggagcgcaaagtggaaatcgccttctaccggaaagatgggagctgcttcctatgtctggtggatgtggtgcccgtgaagaacgaggatggggctgtcatcatgttcatcctcaatttcgaggtggtgatggagaaggacatggtggggtccccggctcatgacaccaaccaccggggcccccccaccagctggctggccccaggccgcgccaagaccttccgcctgaagctgcccgcgctgctggcgctgacggcccgggagtcgtcggtgcggtcgggcggcgcgggcggcgcgggcgccccgggggccgtggtggtggacgtggacctgacgcccgcggcacccagcagcgagtcgctggccctggacgaagtgacagccatggacaaccacgtggcagggctcgggcccgcggaggagcggcgtgcgctggtgggtcccggctctccgccccgcagcgcgcccggccagctcccatcgccccgggcgcacagcctcaaccccgacgcctcgggctccagctgcagcctggcccggacgcgctcccgagaaagctgcgccagcgtgcgccgcgcctcgtcggccgacgacatcgaggccatgcgcgccggggtgctgcccccgccaccgcgccacgccagcaccggggccatgcacccactgcgcagcggcttgctcaactccacctcggactccgacctcgtgcgctaccgcaccattagcaagattccccaaatcaccctcaactttgtggacctcaagggcgaccccttcttggcttcgcccaccagtgaccgtgagatcatagcacctaagataaaggagcgaacccacaatgtcactgagaaggtcacccaggtcctgtccctgggcgccgacgtgctgcctgagtacaagctgcaggcaccgcgcatccaccgctggaccatcctgcattacagccccttcaaggccgtgtgggactggctcatcctgctgctggtcatctacacggctgtcttcacaccctactcggctgccttcctgctgaaggagacggaagaaggcccgcctgctaccgagtgtggctacgcctgccagccgctggctgtggtggacctcatcgtggacatcatgttcattgtggacatcctcatcaacttccgcaccacctacgtcaatgccaacgaggaggtggtcagccaccccggccgcatcgccgtccactacttcaagggctggttcctcatcgacatggtggccgccatccccttcgacctgctcatcttcggctctggctctgaggagctgatcgggctgctgaagactgcgcggctgctgcggctggtgcgcgtggcgcggaagctggatcgctactcagagtacggcgcggccgtgctgttcttgctcatgtgcacctttgcgctcatcgcgcactggctagcctgcatctggtacgccatcggcaacatggagcagccacacatggactcacgcatcggctggctgcacaacctgggcgaccagataggcaaaccctacaacagcagcggcctgggcggcccctccatcaaggacaagtatgtgacggcgctctacttcaccttcagcagcctcaccagtgtgggcttcggcaacgtctctcccaacaccaactcagagaagatcttctccatctgcgtcatgctcattggctccctcatgtatgctagcatcttcggcaacgtgtcggccatcatccagcggctgtactcgggcacagcccgctaccacacacagatgctgcgggtgcgggagttcatccgcttccaccagatccccaatcccctgcgccagcgcctcgaggagtacttccagcacgcctggtcctacaccaacggcatcgacatgaacgcggtgctgaagggcttccctgagtgcctgcaggctgacatctgcctgcacctgaaccgctcactgctgcagcactgcaaacccttccgaggggccaccaagggctgccttcgggccctggccatgaagttcaagaccacacatgcaccgccaggggacacactggtgcatgctggggacctgctcaccgccctgtacttcatctcccggggctccatcgagatcctgcggggcgacgtcgtcgtggccatcctggggaagaatgacatctttggggagcctctgaacctgtatgcaaggcctggcaagtcgaacggggatgtgcgggccctcacctactgtgacctacacaagatccatcgggacgacctgctggaggtgctggacatgtaccctgagttctccgaccacttctggtccagcctggagatcaccttcaacctgcgagataccaacatgatcccgggctcccccggcagtacggagttagagggtggcttcagtcggcaacgcaagcgcaagttgtccttccgcaggcgcacggacaaggacacggagcagccaggggaggtgtcggccttggggccgggccgggcgggggcagggccgagtagccggggccggccgggggggccgtggggggagagcccgtccagtggcccctccagccctgagagcagtgaggatgagggcccaggccgcagctccagccccctccgcctggtgcccttctccagccccaggccccccggagagccgccgggtggggagcccctgatggaggactgcgagaagagcagcgacacttgcaaccccctgtcaggcgccttctcaggagtgtccaacattttcagcttctggggggacagtcggggccgccagtaccaggagctccctcgatgccccgcccccacccccagcctcctcaacatccccctctccagcccgggtcggcggccccggggcgacgtggagagcaggctggatgccctccagcgccagctcaacaggctggagacccggctgagtgcagacatggccactgtcctgcagctgctacagaggcagatgacgctggtcccgcccgcctacagtgctgtgaccaccccggggcctggccccacttccacatccccgctgttgcccgtcagccccctccccatcctcaccttggactcgctttctcaggtttcccagttcatggcgtgtgaggagctgcccccgggggccccagagcttccccaagaaggccccacacgacgcctctccctaccgggccagctgggggccctcacctcccagcccctgcacagacacggctcggacccgggcagttagtggggctgcccagtgtggacacgtggctcacccagggatcaaggcgctgctgggccgctccccttggaggccctgctcaggaggccctgaccgtggaaggggagaggaactcgaaagcacagctcctcccccagcccttgggaccatcttctcctgcagtcccctgggccccagtgagaggggcaggggcagggccggcagtaggtggggcctgtggtccccccactgccctgagggcattagctggtctaactgcccggaggcacccggccctgggccttaggcacctcaaggacttttctgctatttactgctcttattgttaaggataataattaaggatcatatgaataattaatgaagatgctgatgactatgaataataaataattatcctgaggaga

SEQ ID NO: 828 - DNA, 3884 bp, Homo sapiens
  source 1..3884: mol_type = genomic DNA
  misc_feature 1..3884: note = cDNA of KCNH2 gene SNP c.3315G>C (p.Leu1105Phe)
atgccggtgcggaggggccacgtcgcgccgcagaacaccttcctggacaccatcatccgcaagtttgagggccagagccgtaagttcatcatcgccaacgctcgggtggagaactgcgccgtcatctactgcaacgacggcttctgcgagctgtgcggctactcgcgggccgaggtgatgcagcgaccctgcacctgcgacttcctgcacgggccgcgcacgcagcgccgcgctgccgcgcagatcgcgcaggcactgctgggcgccgaggagcgcaaagtggaaatcgccttctaccggaaagatgggagctgcttcctatgtctggtggatgtggtgcccgtgaagaacgaggatggggctgtcatcatgttcatcctcaatttcgaggtggtgatggagaaggacatggtggggtccccggctcatgacaccaaccaccggggcccccccaccagctggctggccccaggccgcgccaagaccttccgcctgaagctgcccgcgctgctggcgctgacggcccgggagtcgtcggtgcggtcgggcggcgcgggcggcgcgggcgccccgggggccgtggtggtggacgtggacctgacgcccgcggcacccagcagcgagtcgctggccctggacgaagtgacagccatggacaaccacgtggcagggctcgggcccgcggaggagcggcgtgcgctggtgggtcccggctctccgccccgcagcgcgcccggccagctcccatcgccccgggcgcacagcctcaaccccgacgcctcgggctccagctgcagcctggcccggacgcgctcccgagaaagctgcgccagcgtgcgccgcgcctcgtcggccgacgacatcgaggccatgcgcgccggggtgctgcccccgccaccgcgccacgccagcaccggggccatgcacccactgcgcagcggcttgctcaactccacctcggactccgacctcgtgcgctaccgcaccattagcaagattccccaaatcaccctcaactttgtggacctcaagggcgaccccttcttggcttcgcccaccagtgaccgtgagatcatagcacctaagataaaggagcgaacccacaatgtcactgagaaggtcacccaggtcctgtccctgggcgccgacgtgctgcctgagtacaagctgcaggcaccgcgcatccaccgctggaccatcctgcattacagccccttcaaggccgtgtgggactggctcatcctgctgctggtcatctacacggctgtcttcacaccctactcggctgccttcctgctgaaggagacggaagaaggcccgcctgctaccgagtgtggctacgcctgccagccgctggctgtggtggacctcatcgtggacatcatgttcattgtggacatcctcatcaacttccgcaccacctacgtcaatgccaacgaggaggtggtcagccaccccggccgcatcgccgtccactacttcaagggctggttcctcatcgacatggtggccgccatccccttcgacctgctcatcttcggctctggctctgaggagctgatcgggctgctgaagactgcgcggctgctgcggctggtgcgcgtggcgcggaagctggatcgctactcagagtacggcgcggccgtgctgttcttgctcatgtgcacctttgcgctcatcgcgcactggctagcctgcatctggtacgccatcggcaacatggagcagccacacatggactcacgcatcggctggctgcacaacctgggcgaccagataggcaaaccctacaacagcagcggcctgggcggcccctccatcaaggacaagtatgtgacggcgctctacttcaccttcagcagcctcaccagtgtgggcttcggcaacgtctctcccaacaccaactcagagaagatcttctccatctgcgtcatgctcattggctccctcatgtatgctagcatcttcggcaacgtgtcggccatcatccagcggctgtactcgggcacagcccgctaccacacacagatgctgcgggtgcgggagttcatccgcttccaccagatccccaatcccctgcgccagcgcctcgaggagtacttccagcacgcctggtcctacaccaacggcatcgacatgaacgcggtgctgaagggcttccctgagtgcctgcaggctgacatctgcctgcacctgaaccgctcactgctgcagcactgcaaacccttccgaggggccaccaagggctgccttcgggccctggccatgaagttcaagaccacacatgcaccgccaggggacacactggtgcatgctggggacctgctcaccgccctgtacttcatctcccggggctccatcgagatcctgcggggcgacgtcgtcgtggccatcctggggaagaatgacatctttggggagcctctgaacctgtatgcaaggcctggcaagtcgaacggggatgtgcgggccctcacctactgtgacctacacaagatccatcgggacgacctgctggaggtgctggacatgtaccctgagttctccgaccacttctggtccagcctggagatcaccttcaacctgcgagataccaacatgatcccgggctcccccggcagtacggagttagagggtggcttcagtcggcaacgcaagcgcaagttgtccttccgcaggcgcacggacaaggacacggagcagccaggggaggtgtcggccttggggccgggccgggcgggggcagggccgagtagccggggccggccgggggggccgtggggggagagcccgtccagtggcccctccagccctgagagcagtgaggatgagggcccaggccgcagctccagccccctccgcctggtgcccttctccagccccaggccccccggagagccgccgggtggggagcccctgatggaggactgcgagaagagcagcgacacttgcaaccccctgtcaggcgccttctcaggagtgtccaacattttcagcttctggggggacagtcggggccgccagtaccaggagctccctcgatgccccgcccccacccccagcctcctcaacatccccctctccagcccgggtcggcggccccggggcgacgtggagagcaggctggatgccctccagcgccagctcaacaggctggagacccggctgagtgcagacatggccactgtcctgcagctgctacagaggcagatgacgctggtcccgcccgcctacagtgctgtgaccaccccggggcctggccccacttccacatccccgctgttgcccgtcagccccctccccaccctcaccttcgactcgctttctcaggtttcccagttcatggcgtgtgaggagctgcccccgggggccccagagcttccccaagaaggccccacacgacgcctctccctaccgggccagctgggggccctcacctcccagcccctgcacagacacggctcggacccgggcagttagtggggctgcccagtgtggacacgtggctcacccagggatcaaggcgctgctgggccgctccccttggaggccctgctcaggaggccctgaccgtggaaggggagaggaactcgaaagcacagctcctcccccagcccttgggaccatcttctcctgcagtcccctgggccccagtgagaggggcaggggcagggccggcagtaggtggggcctgtggtccccccactgccctgagggcattagctggtctaactgcccggaggcacccggccctgggccttaggcacctcaaggacttttctgctatttactgctcttattgttaaggataataattaaggatcatatgaataattaatgaagatgctgatgactatgaataataaataattatcctgaggaga

SEQ ID NO: 829 - DNA, 3884 bp, Homo sapiens
  source 1..3884: mol_type = genomic DNA
  misc_feature 1..3884: note = cDNA of KCNH2 gene SNP c.331G>A (p.Asp111Asn)
atgccggtgcggaggggccacgtcgcgccgcagaacaccttcctggacaccatcatccgcaagtttgagggccagagccgtaagttcatcatcgccaacgctcgggtggagaactgcgccgtcatctactgcaacgacggcttctgcgagctgtgcggctactcgcgggccgaggtgatgcagcgaccctgcacctgcgacttcctgcacgggccgcgcacgcagcgccgcgctgccgcgcagatcgcgcaggcactgctgggcgccgaggagcgcaaagtggaaatcgccttctaccggaaagatgggagctgcttcctatgtctggtgaatgtggtgcccgtgaagaacgaggatggggctgtcatcatgttcatcctcaatttcgaggtggtgatggagaaggacatggtggggtccccggctcatgacaccaaccaccggggcccccccaccagctggctggccccaggccgcgccaagaccttccgcctgaagctgcccgcgctgctggcgctgacggcccgggagtcgtcggtgcggtcgggcggcgcgggcggcgcgggcgccccgggggccgtggtggtggacgtggacctgacgcccgcggcacccagcagcgagtcgctggccctggacgaagtgacagccatggacaaccacgtggcagggctcgggcccgcggaggagcggcgtgcgctggtgggtcccggctctccgccccgcagcgcgcccggccagctcccatcgccccgggcgcacagcctcaaccccgacgcctcgggctccagctgcagcctggcccggacgcgctcccgagaaagctgcgccagcgtgcgccgcgcctcgtcggccgacgacatcgaggccatgcgcgccggggtgctgcccccgccaccgcgccacgccagcaccggggccatgcacccactgcgcagcggcttgctcaactccacctcggactccgacctcgtgcgctaccgcaccattagcaagattccccaaatcaccctcaactttgtggacctcaagggcgaccccttcttggcttcgcccaccagtgaccgtgagatcatagcacctaagataaaggagcgaacccacaatgtcactgagaaggtcacccaggtcctgtccctgggcgccgacgtgctgcctgagtacaagctgcaggcaccgcgcatccaccgctggaccatcctgcattacagccccttcaaggccgtgtgggactggctcatcctgctgctggtcatctacacggctgtcttcacaccctactcggctgccttcctgctgaaggagacggaagaaggcccgcctgctaccgagtgtggctacgcctgccagccgctggctgtggtggacctcatcgtggacatcatgttcattgtggacatcctcatcaacttccgcaccacctacgtcaatgccaacgaggaggtggtcagccaccccggccgcatcgccgtccactacttcaagggctggttcctcatcgacatggtggccgccatccccttcgacctgctcatcttcggctctggctctgaggagctgatcgggctgctgaagactgcgcggctgctgcggctggtgcgcgtggcgcggaagctggatcgctactcagagtacggcgcggccgtgctgttcttgctcatgtgcacctttgcgctcatcgcgcactggctagcctgcatctggtacgccatcggcaacatggagcagccacacatggactcacgcatcggctggctgcacaacctgggcgaccagataggcaaaccctacaacagcagcggcctgggcggcccctccatcaaggacaagtatgtgacggcgctctacttcaccttcagcagcctcaccagtgtgggcttcggcaacgtctctcccaacaccaactcagagaagatcttctccatctgcgtcatgctcattggctccctcatgtatgctagcatcttcggcaacgtgtcggccatcatccagcggctgtactcgggcacagcccgctaccacacacagatgctgcgggtgcgggagttcatccgcttccaccagatccccaatcccctgcgccagcgcctcgaggagtacttccagcacgcctggtcctacaccaacggcatcgacatgaacgcggtgctgaagggcttccctgagtgcctgcaggctgacatctgcctgcacctgaaccgctcactgctgcagcactgcaaacccttccgaggggccaccaagggctgccttcgggccctggccatgaagttcaagaccacacatgcaccgccaggggacacactggtgcatgctggggacctgctcaccgccctgtacttcatctcccggggctccatcgagatcctgcggggcgacgtcgtcgtggccatcctggggaagaatgacatctttggggagcctctgaacctgtatgcaaggcctggcaagtcgaacggggatgtgcgggccctcacctactgtgacctacacaagatccatcgggacgacctgctggaggtgctggacatgtaccctgagttctccgaccacttctggtccagcctggagatcaccttcaacctgcgagataccaacatgatcccgggctcccccggcagtacggagttagagggtggcttcagtcggcaacgcaagcgcaagttgtccttccgcaggcgcacggacaaggacacggagcagccaggggaggtgtcggccttggggccgggccgggcgggggcagggccgagtagccggggccggccgggggggccgtggggggagagcccgtccagtggcccctccagccctgagagcagtgaggatgagggcccaggccgcagctccagccccctccgcctggtgcccttctccagccccaggccccccggagagccgccgggtggggagcccctgatggaggactgcgagaagagcagcgacacttgcaaccccctgtcaggcgccttctcaggagtgtccaacattttcagcttctggggggacagtcggggccgccagtaccaggagctccctcgatgccccgcccccacccccagcctcctcaacatccccctctccagcccgggtcggcggccccggggcgacgtggagagcaggctggatgccctccagcgccagctcaacaggctggagacccggctgagtgcagacatggccactgtcctgcagctgctacagaggcagatgacgctggtcccgcccgcctacagtgctgtgaccaccccggggcctggccccacttccacatccccgctgttgcccgtcagccccctccccaccctcaccttggactcgctttctcaggtttcccagttcatggcgtgtgaggagctgcccccgggggccccagagcttccccaagaaggccccacacgacgcctctccctaccgggccagctgggggccctcacctcccagcccctgcacagacacggctcggacccgggcagttagtggggctgcccagtgtggacacgtggctcacccagggatcaaggcgctgctgggccgctccccttggaggccctgctcaggaggccctgaccgtggaaggggagaggaactcgaaagcacagctcctcccccagcccttgggaccatcttctcctgcagtcccctgggccccagtgagaggggcaggggcagggccggcagtaggtggggcctgtggtccccccactgccctgagggcattagctggtctaactgcccggaggcacccggccctgggccttaggcacctcaaggacttttctgctatttactgctcttattgttaaggataataattaaggatcatatgaataattaatgaagatgctgatgactatgaataataaataattatcctgaggaga

SEQ ID NO: 830 - DNA, 3884 bp, Homo sapiens
  source 1..3884: mol_type = genomic DNA
  misc_feature 1..3884: note = cDNA of KCNH2 gene SNP c.3320C>T (p.Ser1107Leu)
atgccggtgcggaggggccacgtcgcgccgcagaacaccttcctggacaccatcatccgcaagtttgagggccagagccgtaagttcatcatcgccaacgctcgggtggagaactgcgccgtcatctactgcaacgacggcttctgcgagctgtgcggctactcgcgggccgaggtgatgcagcgaccctgcacctgcgacttcctgcacgggccgcgcacgcagcgccgcgctgccgcgcagatcgcgcaggcactgctgggcgccgaggagcgcaaagtggaaatcgccttctaccggaaagatgggagctgcttcctatgtctggtggatgtggtgcccgtgaagaacgaggatggggctgtcatcatgttcatcctcaatttcgaggtggtgatggagaaggacatggtggggtccccggctcatgacaccaaccaccggggcccccccaccagctggctggccccaggccgcgccaagaccttccgcctgaagctgcccgcgctgctggcgctgacggcccgggagtcgtcggtgcggtcgggcggcgcgggcggcgcgggcgccccgggggccgtggtggtggacgtggacctgacgcccgcggcacccagcagcgagtcgctggccctggacgaagtgacagccatggacaaccacgtggcagggctcgggcccgcggaggagcggcgtgcgctggtgggtcccggctctccgccccgcagcgcgcccggccagctcccatcgccccgggcgcacagcctcaaccccgacgcctcgggctccagctgcagcctggcccggacgcgctcccgagaaagctgcgccagcgtgcgccgcgcctcgtcggccgacgacatcgaggccatgcgcgccggggtgctgcccccgccaccgcgccacgccagcaccggggccatgcacccactgcgcagcggcttgctcaactccacctcggactccgacctcgtgcgctaccgcaccattagcaagattccccaaatcaccctcaactttgtggacctcaagggcgaccccttcttggcttcgcccaccagtgaccgtgagatcatagcacctaagataaaggagcgaacccacaatgtcactgagaaggtcacccaggtcctgtccctgggcgccgacgtgctgcctgagtacaagctgcaggcaccgcgcatccaccgctggaccatcctgcattacagccccttcaaggccgtgtgggactggctcatcctgctgctggtcatctacacggctgtcttcacaccctactcggctgccttcctgctgaaggagacggaagaaggcccgcctgctaccgagtgtggctacgcctgccagccgctggctgtggtggacctcatcgtggacatcatgttcattgtggacatcctcatcaacttccgcaccacctacgtcaatgccaacgaggaggtggtcagccaccccggccgcatcgccgtccactacttcaagggctggttcctcatcgacatggtggccgccatccccttcgacctgctcatcttcggctctggctctgaggagctgatcgggctgctgaagactgcgcggctgctgcggctggtgcgcgtggcgcggaagctggatcgctactcagagtacggcgcggccgtgctgttcttgctcatgtgcacctttgcgctcatcgcgcactggctagcctgcatctggtacgccatcggcaacatggagcagccacacatggactcacgcatcggctggctgcacaacctgggcgaccagataggcaaaccctacaacagcagcggcctgggcggcccctccatcaaggacaagtatgtgacggcgctctacttcaccttcagcagcctcaccagtgtgggcttcggcaacgtctctcccaacaccaactcagagaagatcttctccatctgcgtcatgctcattggctccctcatgtatgctagcatcttcggcaacgtgtcggccatcatccagcggctgtactcgggcacagcccgctaccacacacagatgctgcgggtgcgggagttcatccgcttccaccagatccccaatcccctgcgccagcgcctcgaggagtacttccagcacgcctggtcctacaccaacggcatcgacatgaacgcggtgctgaagggcttccctgagtgcctgcaggctgacatctgcctgcacctgaaccgctcactgctgcagcactgcaaacccttccgaggggccaccaagggctgccttcgggccctggccatgaagttcaagaccacacatgcaccgccaggggacacactggtgcatgctggggacctgctcaccgccctgtacttcatctcccggggctccatcgagatcctgcggggcgacgtcgtcgtggccatcctggggaagaatgacatctttggggagcctctgaacctgtatgcaaggcctggcaagtcgaacggggatgtgcgggccctcacctactgtgacctacacaagatccatcgggacgacctgctggaggtgctggacatgtaccctgagttctccgaccacttctggtccagcctggagatcaccttcaacctgcgagataccaacatgatcccgggctcccccggcagtacggagttagagggtggcttcagtcggcaacgcaagcgcaagttgtccttccgcaggcgcacggacaaggacacggagcagccaggggaggtgtcggccttggggccgggccgggcgggggcagggccgagtagccggggccggccgggggggccgtggggggagagcccgtccagtggcccctccagccctgagagcagtgaggatgagggcccaggccgcagctccagccccctccgcctggtgcccttctccagccccaggccccccggagagccgccgggtggggagcccctgatggaggactgcgagaagagcagcgacacttgcaaccccctgtcaggcgccttctcaggagtgtccaacattttcagcttctggggggacagtcggggccgccagtaccaggagctccctcgatgccccgcccccacccccagcctcctcaacatccccctctccagcccgggtcggcggccccggggcgacgtggagagcaggctggatgccctccagcgccagctcaacaggctggagacccggctgagtgcagacatggccactgtcctgcagctgctacagaggcagatgacgctggtcccgcccgcctacagtgctgtgaccaccccggggcctggccccacttccacatccccgctgttgcccgtcagccccctccccaccctcaccttggacttgctttctcaggtttcccagttcatggcgtgtgaggagctgcccccgggggccccagagcttccccaagaaggccccacacgacgcctctccctaccgggccagctgggggccctcacctcccagcccctgcacagacacggctcggacccgggcagttagtggggctgcccagtgtggacacgtggctcacccagggatcaaggcgctgctgggccgctccccttggaggccctgctcaggaggccctgaccgtggaaggggagaggaactcgaaagcacagctcctcccccagcccttgggaccatcttctcctgcagtcccctgggccccagtgagaggggcaggggcagggccggcagtaggtggggcctgtggtccccccactgccctgagggcattagctggtctaactgcccggaggcacccggccctgggccttaggcacctcaaggacttttctgctatttactgctcttattgttaaggataataattaaggatcatatgaataattaatgaagatgctgatgactatgaataataaataattatcctgaggaga

SEQ ID NO: 831 - DNA, 3884 bp, Homo sapiens
  source 1..3884: mol_type = genomic DNA
  misc_feature 1..3884: note = cDNA of KCNH2 gene SNP c.3322C>G (p.Leu1108Val)
atgccggtgcggaggggccacgtcgcgccgcagaacaccttcctggacaccatcatccgcaagtttgagggccagagccgtaagttcatcatcgccaacgctcgggtggagaactgcgccgtcatctactgcaacgacggcttctgcgagctgtgcggctactcgcgggccgaggtgatgcagcgaccctgcacctgcgacttcctgcacgggccgcgcacgcagcgccgcgctgccgcgcagatcgcgcaggcactgctgggcgccgaggagcgcaaagtggaaatcgccttctaccggaaagatgggagctgcttcctatgtctggtggatgtggtgcccgtgaagaacgaggatggggctgtcatcatgttcatcctcaatttcgaggtggtgatggagaaggacatggtggggtccccggctcatgacaccaaccaccggggcccccccaccagctggctggccccaggccgcgccaagaccttccgcctgaagctgcccgcgctgctggcgctgacggcccgggagtcgtcggtgcggtcgggcggcgcgggcggcgcgggcgccccgggggccgtggtggtggacgtggacctgacgcccgcggcacccagcagcgagtcgctggccctggacgaagtgacagccatggacaaccacgtggcagggctcgggcccgcggaggagcggcgtgcgctggtgggtcccggctctccgccccgcagcgcgcccggccagctcccatcgccccgggcgcacagcctcaaccccgacgcctcgggctccagctgcagcctggcccggacgcgctcccgagaaagctgcgccagcgtgcgccgcgcctcgtcggccgacgacatcgaggccatgcgcgccggggtgctgcccccgccaccgcgccacgccagcaccggggccatgcacccactgcgcagcggcttgctcaactccacctcggactccgacctcgtgcgctaccgcaccattagcaagattccccaaatcaccctcaactttgtggacctcaagggcgaccccttcttggcttcgcccaccagtgaccgtgagatcatagcacctaagataaaggagcgaacccacaatgtcactgagaaggtcacccaggtcctgtccctgggcgccgacgtgctgcctgagtacaagctgcaggcaccgcgcatccaccgctggaccatcctgcattacagccccttcaaggccgtgtgggactggctcatcctgctgctggtcatctacacggctgtcttcacaccctactcggctgccttcctgctgaaggagacggaagaaggcccgcctgctaccgagtgtggctacgcctgccagccgctggctgtggtggacctcatcgtggacatcatgttcattgtggacatcctcatcaacttccgcaccacctacgtcaatgccaacgaggaggtggtcagccaccccggccgcatcgccgtccactacttcaagggctggttcctcatcgacatggtggccgccatccccttcgacctgctcatcttcggctctggctctgaggagctgatcgggctgctgaagactgcgcggctgctgcggctggtgcgcgtggcgcggaagctggatcgctactcagagtacggcgcggccgtgctgttcttgctcatgtgcacctttgcgctcatcgcgcactggctagcctgcatctggtacgccatcggcaacatggagcagccacacatggactcacgcatcggctggctgcacaacctgggcgaccagataggcaaaccctacaacagcagcggcctgggcggcccctccatcaaggacaagtatgtgacggcgctctacttcaccttcagcagcctcaccagtgtgggcttcggcaacgtctctcccaacaccaactcagagaagatcttctccatctgcgtcatgctcattggctccctcatgtatgctagcatcttcggcaacgtgtcggccatcatccagcggctgtactcgggcacagcccgctaccacacacagatgctgcgggtgcgggagttcatccgcttccaccagatccccaatcccctgcgccagcgcctcgaggagtacttccagcacgcctggtcctacaccaacggcatcgacatgaacgcggtgctgaagggcttccctgagtgcctgcaggctgacatctgcctgcacctgaaccgctcactgctgcagcactgcaaacccttccgaggggccaccaagggctgccttcgggccctggccatgaagttcaagaccacacatgcaccgccaggggacacactggtgcatgctggggacctgctcaccgccctgtacttcatctcccggggctccatcgagatcctgcggggcgacgtcgtcgtggccatcctggggaagaatgacatctttggggagcctctgaacctgtatgcaaggcctggcaagtcgaacggggatgtgcgggccctcacctactgtgacctacacaagatccatcgggacgacctgctggaggtgctggacatgtaccctgagttctccgaccacttctggtccagcctggagatcaccttcaacctgcgagataccaacatgatcccgggctcccccggcagtacggagttagagggtggcttcagtcggcaacgcaagcgcaagttgtccttccgcaggcgcacggacaaggacacggagcagccaggggaggtgtcggccttggggccgggccgggcgggggcagggccgagtagccggggccggccgggggggccgtggggggagagcccgtccagtggcccctccagccctgagagcagtgaggatgagggcccaggccgcagctccagccccctccgcctggtgcccttctccagccccaggccccccggagagccgccgggtggggagcccctgatggaggactgcgagaagagcagcgacacttgcaaccccctgtcaggcgccttctcaggagtgtccaacattttcagcttctggggggacagtcggggccgccagtaccaggagctccctcgatgccccgcccccacccccagcctcctcaacatccccctctccagcccgggtcggcggccccggggcgacgtggagagcaggctggatgccctccagcgccagctcaacaggctggagacccggctgagtgcagacatggccactgtcctgcagctgctacagaggcagatgacgctggtcccgcccgcctacagtgctgtgaccaccccggggcctggccccacttccacatccccgctgttgcccgtcagccccctccccaccctcaccttggactcggtttctcaggtttcccagttcatggcgtgtgaggagctgcccccgggggccccagagcttccccaagaaggccccacacgacgcctctccctaccgggccagctgggggccctcacctcccagcccctgcacagacacggctcggacccgggcagttagtggggctgcccagtgtggacacgtggctcacccagggatcaaggcgctgctgggccgctccccttggaggccctgctcaggaggccctgaccgtggaaggggagaggaactcgaaagcacagctcctcccccagcccttgggaccatcttctcctgcagtcccctgggccccagtgagaggggcaggggcagggccggcagtaggtggggcctgtggtccccccactgccctgagggcattagctggtctaactgcccggaggcacccggccctgggccttaggcacctcaaggacttttctgctatttactgctcttattgttaaggataataattaaggatcatatgaataattaatgaagatgctgatgactatgaataataaataattatcctgaggaga

SEQ ID NO: 832 - DNA, 3884 bp, Homo sapiens
  source 1..3884: mol_type = genomic DNA
  misc_feature 1..3884: note = cDNA of KCNH2 gene SNP c.332A>T (p.Asp111Val)
atgccggtgcggaggggccacgtcgcgccgcagaacaccttcctggacaccatcatccgcaagtttgagggccagagccgtaagttcatcatcgccaacgctcgggtggagaactgcgccgtcatctactgcaacgacggcttctgcgagctgtgcggctactcgcgggccgaggtgatgcagcgaccctgcacctgcgacttcctgcacgggccgcgcacgcagcgccgcgctgccgcgcagatcgcgcaggcactgctgggcgccgaggagcgcaaagtggaaatcgccttctaccggaaagatgggagctgcttcctatgtctggtggttgtggtgcccgtgaagaacgaggatggggctgtcatcatgttcatcctcaatttcgaggtggtgatggagaaggacatggtggggtccccggctcatgacaccaaccaccggggcccccccaccagctggctggccccaggccgcgccaagaccttccgcctgaagctgcccgcgctgctggcgctgacggcccgggagtcgtcggtgcggtcgggcggcgcgggcggcgcgggcgccccgggggccgtggtggtggacgtggacctgacgcccgcggcacccagcagcgagtcgctggccctggacgaagtgacagccatggacaaccacgtggcagggctcgggcccgcggaggagcggcgtgcgctggtgggtcccggctctccgccccgcagcgcgcccggccagctcccatcgccccgggcgcacagcctcaaccccgacgcctcgggctccagctgcagcctggcccggacgcgctcccgagaaagctgcgccagcgtgcgccgcgcctcgtcggccgacgacatcgaggccatgcgcgccggggtgctgcccccgccaccgcgccacgccagcaccggggccatgcacccactgcgcagcggcttgctcaactccacctcggactccgacctcgtgcgctaccgcaccattagcaagattccccaaatcaccctcaactttgtggacctcaagggcgaccccttcttggcttcgcccaccagtgaccgtgagatcatagcacctaagataaaggagcgaacccacaatgtcactgagaaggtcacccaggtcctgtccctgggcgccgacgtgctgcctgagtacaagctgcaggcaccgcgcatccaccgctggaccatcctgcattacagccccttcaaggccgtgtgggactggctcatcctgctgctggtcatctacacggctgtcttcacaccctactcggctgccttcctgctgaaggagacggaagaaggcccgcctgctaccgagtgtggctacgcctgccagccgctggctgtggtggacctcatcgtggacatcatgttcattgtggacatcctcatcaacttccgcaccacctacgtcaatgccaacgaggaggtggtcagccaccccggccgcatcgccgtccactacttcaagggctggttcctcatcgacatggtggccgccatccccttcgacctgctcatcttcggctctggctctgaggagctgatcgggctgctgaagactgcgcggctgctgcggctggtgcgcgtggcgcggaagctggatcgctactcagagtacggcgcggccgtgctgttcttgctcatgtgcacctttgcgctcatcgcgcactggctagcctgcatctggtacgccatcggcaacatggagcagccacacatggactcacgcatcggctggctgcacaacctgggcgaccagataggcaaaccctacaacagcagcggcctgggcggcccctccatcaaggacaagtatgtgacggcgctctacttcaccttcagcagcctcaccagtgtgggcttcggcaacgtctctcccaacaccaactcagagaagatcttctccatctgcgtcatgctcattggctccctcatgtatgctagcatcttcggcaacgtgtcggccatcatccagcggctgtactcgggcacagcccgctaccacacacagatgctgcgggtgcgggagttcatccgcttccaccagatccccaatcccctgcgccagcgcctcgaggagtacttccagcacgcctggtcctacaccaacggcatcgacatgaacgcggtgctgaagggcttccctgagtgcctgcaggctgacatctgcctgcacctgaaccgctcactgctgcagcactgcaaacccttccgaggggccaccaagggctgccttcgggccctggccatgaagttcaagaccacacatgcaccgccaggggacacactggtgcatgctggggacctgctcaccgccctgtacttcatctcccggggctccatcgagatcctgcggggcgacgtcgtcgtggccatcctggggaagaatgacatctttggggagcctctgaacctgtatgcaaggcctggcaagtcgaacggggatgtgcgggccctcacctactgtgacctacacaagatccatcgggacgacctgctggaggtgctggacatgtaccctgagttctccgaccacttctggtccagcctggagatcaccttcaacctgcgagataccaacatgatcccgggctcccccggcagtacggagttagagggtggcttcagtcggcaacgcaagcgcaagttgtccttccgcaggcgcacggacaaggacacggagcagccaggggaggtgtcggccttggggccgggccgggcgggggcagggccgagtagccggggccggccgggggggccgtggggggagagcccgtccagtggcccctccagccctgagagcagtgaggatgagggcccaggccgcagctccagccccctccgcctggtgcccttctccagccccaggccccccggagagccgccgggtggggagcccctgatggaggactgcgagaagagcagcgacacttgcaaccccctgtcaggcgccttctcaggagtgtccaacattttcagcttctggggggacagtcggggccgccagtaccaggagctccctcgatgccccgcccccacccccagcctcctcaacatccccctctccagcccgggtcggcggccccggggcgacgtggagagcaggctggatgccctccagcgccagctcaacaggctggagacccggctgagtgcagacatggccactgtcctgcagctgctacagaggcagatgacgctggtcccgcccgcctacagtgctgtgaccaccccggggcctggccccacttccacatccccgctgttgcccgtcagccccctccccaccctcaccttggactcgctttctcaggtttcccagttcatggcgtgtgaggagctgcccccgggggccccagagcttccccaagaaggccccacacgacgcctctccctaccgggccagctgggggccctcacctcccagcccctgcacagacacggctcggacccgggcagttagtggggctgcccagtgtggacacgtggctcacccagggatcaaggcgctgctgggccgctccccttggaggccctgctcaggaggccctgaccgtggaaggggagaggaactcgaaagcacagctcctcccccagcccttgggaccatcttctcctgcagtcccctgggccccagtgagaggggcaggggcagggccggcagtaggtggggcctgtggtccccccactgccctgagggcattagctggtctaactgcccggaggcacccggccctgggccttaggcacctcaaggacttttctgctatttactgctcttattgttaaggataataattaaggatcatatgaataattaatgaagatgctgatgactatgaataataaataattatcctgaggaga

SEQ ID NO: 833 - DNA, 3884 bp, Homo sapiens
  source 1..3884: mol_type = genomic DNA
  misc_feature 1..3884: note = cDNA of KCNH2 gene SNP c.3343A>G (p.Met1115Val)
atgccggtgcggaggggccacgtcgcgccgcagaacaccttcctggacaccatcatccgcaagtttgagggccagagccgtaagttcatcatcgccaacgctcgggtggagaactgcgccgtcatctactgcaacgacggcttctgcgagctgtgcggctactcgcgggccgaggtgatgcagcgaccctgcacctgcgacttcctgcacgggccgcgcacgcagcgccgcgctgccgcgcagatcgcgcaggcactgctgggcgccgaggagcgcaaagtggaaatcgccttctaccggaaagatgggagctgcttcctatgtctggtggatgtggtgcccgtgaagaacgaggatggggctgtcatcatgttcatcctcaatttcgaggtggtgatggagaaggacatggtggggtccccggctcatgacaccaaccaccggggcccccccaccagctggctggccccaggccgcgccaagaccttccgcctgaagctgcccgcgctgctggcgctgacggcccgggagtcgtcggtgcggtcgggcggcgcgggcggcgcgggcgccccgggggccgtggtggtggacgtggacctgacgcccgcggcacccagcagcgagtcgctggccctggacgaagtgacagccatggacaaccacgtggcagggctcgggcccgcggaggagcggcgtgcgctggtgggtcccggctctccgccccgcagcgcgcccggccagctcccatcgccccgggcgcacagcctcaaccccgacgcctcgggctccagctgcagcctggcccggacgcgctcccgagaaagctgcgccagcgtgcgccgcgcctcgtcggccgacgacatcgaggccatgcgcgccggggtgctgcccccgccaccgcgccacgccagcaccggggccatgcacccactgcgcagcggcttgctcaactccacctcggactccgacctcgtgcgctaccgcaccattagcaagattccccaaatcaccctcaactttgtggacctcaagggcgaccccttcttggcttcgcccaccagtgaccgtgagatcatagcacctaagataaaggagcgaacccacaatgtcactgagaaggtcacccaggtcctgtccctgggcgccgacgtgctgcctgagtacaagctgcaggcaccgcgcatccaccgctggaccatcctgcattacagccccttcaaggccgtgtgggactggctcatcctgctgctggtcatctacacggctgtcttcacaccctactcggctgccttcctgctgaaggagacggaagaaggcccgcctgctaccgagtgtggctacgcctgccagccgctggctgtggtggacctcatcgtggacatcatgttcattgtggacatcctcatcaacttccgcaccacctacgtcaatgccaacgaggaggtggtcagccaccccggccgcatcgccgtccactacttcaagggctggttcctcatcgacatggtggccgccatccccttcgacctgctcatcttcggctctggctctgaggagctgatcgggctgctgaagactgcgcggctgctgcggctggtgcgcgtggcgcggaagctggatcgctactcagagtacggcgcggccgtgctgttcttgctcatgtgcacctttgcgctcatcgcgcactggctagcctgcatctggtacgccatcggcaacatggagcagccacacatggactcacgcatcggctggctgcacaacctgggcgaccagataggcaaaccctacaacagcagcggcctgggcggcccctccatcaaggacaagtatgtgacggcgctctacttcaccttcagcagcctcaccagtgtgggcttcggcaacgtctctcccaacaccaactcagagaagatcttctccatctgcgtcatgctcattggctccctcatgtatgctagcatcttcggcaacgtgtcggccatcatccagcggctgtactcgggcacagcccgctaccacacacagatgctgcgggtgcgggagttcatccgcttccaccagatccccaatcccctgcgccagcgcctcgaggagtacttccagcacgcctggtcctacaccaacggcatcgacatgaacgcggtgctgaagggcttccctgagtgcctgcaggctgacatctgcctgcacctgaaccgctcactgctgcagcactgcaaacccttccgaggggccaccaagggctgccttcgggccctggccatgaagttcaagaccacacatgcaccgccaggggacacactggtgcatgctggggacctgctcaccgccctgtacttcatctcccggggctccatcgagatcctgcggggcgacgtcgtcgtggccatcctggggaagaatgacatctttggggagcctctgaacctgtatgcaaggcctggcaagtcgaacggggatgtgcgggccctcacctactgtgacctacacaagatccatcgggacgacctgctggaggtgctggacatgtaccctgagttctccgaccacttctggtccagcctggagatcaccttcaacctgcgagataccaacatgatcccgggctcccccggcagtacggagttagagggtggcttcagtcggcaacgcaagcgcaagttgtccttccgcaggcgcacggacaaggacacggagcagccaggggaggtgtcggccttggggccgggccgggcgggggcagggccgagtagccggggccggccgggggggccgtggggggagagcccgtccagtggcccctccagccctgagagcagtgaggatgagggcccaggccgcagctccagccccctccgcctggtgcccttctccagccccaggccccccggagagccgccgggtggggagcccctgatggaggactgcgagaagagcagcgacacttgcaaccccctgtcaggcgccttctcaggagtgtccaacattttcagcttctggggggacagtcggggccgccagtaccaggagctccctcgatgccccgcccccacccccagcctcctcaacatccccctctccagcccgggtcggcggccccggggcgacgtggagagcaggctggatgccctccagcgccagctcaacaggctggagacccggctgagtgcagacatggccactgtcctgcagctgctacagaggcagatgacgctggtcccgcccgcctacagtgctgtgaccaccccggggcctggccccacttccacatccccgctgttgcccgtcagccccctccccaccctcaccttggactcgctttctcaggtttcccagttcgtggcgtgtgaggagctgcccccgggggccccagagcttccccaagaaggccccacacgacgcctctccctaccgggccagctgggggccctcacctcccagcccctgcacagacacggctcggacccgggcagttagtggggctgcccagtgtggacacgtggctcacccagggatcaaggcgctgctgggccgctccccttggaggccctgctcaggaggccctgaccgtggaaggggagaggaactcgaaagcacagctcctcccccagcccttgggaccatcttctcctgcagtcccctgggccccagtgagaggggcaggggcagggccggcagtaggtggggcctgtggtccccccactgccctgagggcattagctggtctaactgcccggaggcacccggccctgggccttaggcacctcaaggacttttctgctatttactgctcttattgttaaggataataattaaggatcatatgaataattaatgaagatgctgatgactatgaataataaataattatcctgaggaga

SEQ ID NO: 834 - DNA, 3884 bp, Homo sapiens
  source 1..3884: mol_type = genomic DNA
  misc_feature 1..3884: note = cDNA of KCNH2 gene SNP c.3346G>A (p.Ala1116Thr)
atgccggtgcggaggggccacgtcgcgccgcagaacaccttcctggacaccatcatccgcaagtttgagggccagagccgtaagttcatcatcgccaacgctcgggtggagaactgcgccgtcatctactgcaacgacggcttctgcgagctgtgcggctactcgcgggccgaggtgatgcagcgaccctgcacctgcgacttcctgcacgggccgcgcacgcagcgccgcgctgccgcgcagatcgcgcaggcactgctgggcgccgaggagcgcaaagtggaaatcgccttctaccggaaagatgggagctgcttcctatgtctggtggatgtggtgcccgtgaagaacgaggatggggctgtcatcatgttcatcctcaatttcgaggtggtgatggagaaggacatggtggggtccccggctcatgacaccaaccaccggggcccccccaccagctggctggccccaggccgcgccaagaccttccgcctgaagctgcccgcgctgctggcgctgacggcccgggagtcgtcggtgcggtcgggcggcgcgggcggcgcgggcgccccgggggccgtggtggtggacgtggacctgacgcccgcggcacccagcagcgagtcgctggccctggacgaagtgacagccatggacaaccacgtggcagggctcgggcccgcggaggagcggcgtgcgctggtgggtcccggctctccgccccgcagcgcgcccggccagctcccatcgccccgggcgcacagcctcaaccccgacgcctcgggctccagctgcagcctggcccggacgcgctcccgagaaagctgcgccagcgtgcgccgcgcctcgtcggccgacgacatcgaggccatgcgcgccggggtgctgcccccgccaccgcgccacgccagcaccggggccatgcacccactgcgcagcggcttgctcaactccacctcggactccgacctcgtgcgctaccgcaccattagcaagattccccaaatcaccctcaactttgtggacctcaagggcgaccccttcttggcttcgcccaccagtgaccgtgagatcatagcacctaagataaaggagcgaacccacaatgtcactgagaaggtcacccaggtcctgtccctgggcgccgacgtgctgcctgagtacaagctgcaggcaccgcgcatccaccgctggaccatcctgcattacagccccttcaaggccgtgtgggactggctcatcctgctgctggtcatctacacggctgtcttcacaccctactcggctgccttcctgctgaaggagacggaagaaggcccgcctgctaccgagtgtggctacgcctgccagccgctggctgtggtggacctcatcgtggacatcatgttcattgtggacatcctcatcaacttccgcaccacctacgtcaatgccaacgaggaggtggtcagccaccccggccgcatcgccgtccactacttcaagggctggttcctcatcgacatggtggccgccatccccttcgacctgctcatcttcggctctggctctgaggagctgatcgggctgctgaagactgcgcggctgctgcggctggtgcgcgtggcgcggaagctggatcgctactcagagtacggcgcggccgtgctgttcttgctcatgtgcacctttgcgctcatcgcgcactggctagcctgcatctggtacgccatcggcaacatggagcagccacacatggactcacgcatcggctggctgcacaacctgggcgaccagataggcaaaccctacaacagcagcggcctgggcggcccctccatcaaggacaagtatgtgacggcgctctacttcaccttcagcagcctcaccagtgtgggcttcggcaacgtctctcccaacaccaactcagagaagatcttctccatctgcgtcatgctcattggctccctcatgtatgctagcatcttcggcaacgtgtcggccatcatccagcggctgtactcgggcacagcccgctaccacacacagatgctgcgggtgcgggagttcatccgcttccaccagatccccaatcccctgcgccagcgcctcgaggagtacttccagcacgcctggtcctacaccaacggcatcgacatgaacgcggtgctgaagggcttccctgagtgcctgcaggctgacatctgcctgcacctgaaccgctcactgctgcagcactgcaaacccttccgaggggccaccaagggctgccttcgggccctggccatgaagttcaagaccacacatgcaccgccaggggacacactggtgcatgctggggacctgctcaccgccctgtacttcatctcccggggctccatcgagatcctgcggggcgacgtcgtcgtggccatcctggggaagaatgacatctttggggagcctctgaacctgtatgcaaggcctggcaagtcgaacggggatgtgcgggccctcacctactgtgacctacacaagatccatcgggacgacctgctggaggtgctggacatgtaccctgagttctccgaccacttctggtccagcctggagatcaccttcaacctgcgagataccaacatgatcccgggctcccccggcagtacggagttagagggtggcttcagtcggcaacgcaagcgcaagttgtccttccgcaggcgcacggacaaggacacggagcagccaggggaggtgtcggccttggggccgggccgggcgggggcagggccgagtagccggggccggccgggggggccgtggggggagagcccgtccagtggcccctccagccctgagagcagtgaggatgagggcccaggccgcagctccagccccctccgcctggtgcccttctccagccccaggccccccggagagccgccgggtggggagcccctgatggaggactgcgagaagagcagcgacacttgcaaccccctgtcaggcgccttctcaggagtgtccaacattttcagcttctggggggacagtcggggccgccagtaccaggagctccctcgatgccccgcccccacccccagcctcctcaacatccccctctccagcccgggtcggcggccccggggcgacgtggagagcaggctggatgccctccagcgccagctcaacaggctggagacccggctgagtgcagacatggccactgtcctgcagctgctacagaggcagatgacgctggtcccgcccgcctacagtgctgtgaccaccccggggcctggccccacttccacatccccgctgttgcccgtcagccccctccccaccctcaccttggactcgctttctcaggtttcccagttcatgacgtgtgaggagctgcccccgggggccccagagcttccccaagaaggccccacacgacgcctctccctaccgggccagctgggggccctcacctcccagcccctgcacagacacggctcggacccgggcagttagtggggctgcccagtgtggacacgtggctcacccagggatcaaggcgctgctgggccgctccccttggaggccctgctcaggaggccctgaccgtggaaggggagaggaactcgaaagcacagctcctcccccagcccttgggaccatcttctcctgcagtcccctgggccccagtgagaggggcaggggcagggccggcagtaggtggggcctgtggtccccccactgccctgagggcattagctggtctaactgcccggaggcacccggccctgggccttaggcacctcaaggacttttctgctatttactgctcttattgttaaggataataattaaggatcatatgaataattaatgaagatgctgatgactatgaataataaataattatcctgaggaga

SEQ ID NO: 835 - DNA, 3884 bp, Homo sapiens
  source 1..3884: mol_type = genomic DNA
  misc_feature 1..3884: note = cDNA of KCNH2 gene SNP c.3347C>T (p.Ala1116Val)
atgccggtgcggaggggccacgtcgcgccgcagaacaccttcctggacaccatcatccgcaagtttgagggccagagccgtaagttcatcatcgccaacgctcgggtggagaactgcgccgtcatctactgcaacgacggcttctgcgagctgtgcggctactcgcgggccgaggtgatgcagcgaccctgcacctgcgacttcctgcacgggccgcgcacgcagcgccgcgctgccgcgcagatcgcgcaggcactgctgggcgccgaggagcgcaaagtggaaatcgccttctaccggaaagatgggagctgcttcctatgtctggtggatgtggtgcccgtgaagaacgaggatggggctgtcatcatgttcatcctcaatttcgaggtggtgatggagaaggacatggtggggtccccggctcatgacaccaaccaccggggcccccccaccagctggctggccccaggccgcgccaagaccttccgcctgaagctgcccgcgctgctggcgctgacggcccgggagtcgtcggtgcggtcgggcggcgcgggcggcgcgggcgccccgggggccgtggtggtggacgtggacctgacgcccgcggcacccagcagcgagtcgctggccctggacgaagtgacagccatggacaaccacgtggcagggctcgggcccgcggaggagcggcgtgcgctggtgggtcccggctctccgccccgcagcgcgcccggccagctcccatcgccccgggcgcacagcctcaaccccgacgcctcgggctccagctgcagcctggcccggacgcgctcccgagaaagctgcgccagcgtgcgccgcgcctcgtcggccgacgacatcgaggccatgcgcgccggggtgctgcccccgccaccgcgccacgccagcaccggggccatgcacccactgcgcagcggcttgctcaactccacctcggactccgacctcgtgcgctaccgcaccattagcaagattccccaaatcaccctcaactttgtggacctcaagggcgaccccttcttggcttcgcccaccagtgaccgtgagatcatagcacctaagataaaggagcgaacccacaatgtcactgagaaggtcacccaggtcctgtccctgggcgccgacgtgctgcctgagtacaagctgcaggcaccgcgcatccaccgctggaccatcctgcattacagccccttcaaggccgtgtgggactggctcatcctgctgctggtcatctacacggctgtcttcacaccctactcggctgccttcctgctgaaggagacggaagaaggcccgcctgctaccgagtgtggctacgcctgccagccgctggctgtggtggacctcatcgtggacatcatgttcattgtggacatcctcatcaacttccgcaccacctacgtcaatgccaacgaggaggtggtcagccaccccggccgcatcgccgtccactacttcaagggctggttcctcatcgacatggtggccgccatccccttcgacctgctcatcttcggctctggctctgaggagctgatcgggctgctgaagactgcgcggctgctgcggctggtgcgcgtggcgcggaagctggatcgctactcagagtacggcgcggccgtgctgttcttgctcatgtgcacctttgcgctcatcgcgcactggctagcctgcatctggtacgccatcggcaacatggagcagccacacatggactcacgcatcggctggctgcacaacctgggcgaccagataggcaaaccctacaacagcagcggcctgggcggcccctccatcaaggacaagtatgtgacggcgctctacttcaccttcagcagcctcaccagtgtgggcttcggcaacgtctctcccaacaccaactcagagaagatcttctccatctgcgtcatgctcattggctccctcatgtatgctagcatcttcggcaacgtgtcggccatcatccagcggctgtactcgggcacagcccgctaccacacacagatgctgcgggtgcgggagttcatccgcttccaccagatccccaatcccctgcgccagcgcctcgaggagtacttccagcacgcctggtcctacaccaacggcatcgacatgaacgcggtgctgaagggcttccctgagtgcctgcaggctgacatctgcctgcacctgaaccgctcactgctgcagcactgcaaacccttccgaggggccaccaagggctgccttcgggccctggccatgaagttcaagaccacacatgcaccgccaggggacacactggtgcatgctggggacctgctcaccgccctgtacttcatctcccggggctccatcgagatcctgcggggcgacgtcgtcgtggccatcctggggaagaatgacatctttggggagcctctgaacctgtatgcaaggcctggcaagtcgaacggggatgtgcgggccctcacctactgtgacctacacaagatccatcgggacgacctgctggaggtgctggacatgtaccctgagttctccgaccacttctggtccagcctggagatcaccttcaacctgcgagataccaacatgatcccgggctcccccggcagtacggagttagagggtggcttcagtcggcaacgcaagcgcaagttgtccttccgcaggcgcacggacaaggacacggagcagccaggggaggtgtcggccttggggccgggccgggcgggggcagggccgagtagccggggccggccgggggggccgtggggggagagcccgtccagtggcccctccagccctgagagcagtgaggatgagggcccaggccgcagctccagccccctccgcctggtgcccttctccagccccaggccccccggagagccgccgggtggggagcccctgatggaggactgcgagaagagcagcgacacttgcaaccccctgtcaggcgccttctcaggagtgtccaacattttcagcttctggggggacagtcggggccgccagtaccaggagctccctcgatgccccgcccccacccccagcctcctcaacatccccctctccagcccgggtcggcggccccggggcgacgtggagagcaggctggatgccctccagcgccagctcaacaggctggagacccggctgagtgcagacatggccactgtcctgcagctgctacagaggcagatgacgctggtcccgcccgcctacagtgctgtgaccaccccggggcctggccccacttccacatccccgctgttgcccgtcagccccctccccaccctcaccttggactcgctttctcaggtttcccagttcatggtgtgtgaggagctgcccccgggggccccagagcttccccaagaaggccccacacgacgcctctccctaccgggccagctgggggccctcacctcccagcccctgcacagacacggctcggacccgggcagttagtggggctgcccagtgtggacacgtggctcacccagggatcaaggcgctgctgggccgctccccttggaggccctgctcaggaggccctgaccgtggaaggggagaggaactcgaaagcacagctcctcccccagcccttgggaccatcttctcctgcagtcccctgggccccagtgagaggggcaggggcagggccggcagtaggtggggcctgtggtccccccactgccctgagggcattagctggtctaactgcccggaggcacccggccctgggccttaggcacctcaaggacttttctgctatttactgctcttattgttaaggataataattaaggatcatatgaataattaatgaagatgctgatgactatgaataataaataattatcctgaggaga

SEQ ID NO: 836 - DNA, 3884 bp, Homo sapiens
  source 1..3884: mol_type = genomic DNA
  misc_feature 1..3884: note = cDNA of KCNH2 gene SNP c.3350G>A (p.Cys1117Tyr)
atgccggtgcggaggggccacgtcgcgccgcagaacaccttcctggacaccatcatccgcaagtttgagggccagagccgtaagttcatcatcgccaacgctcgggtggagaactgcgccgtcatctactgcaacgacggcttctgcgagctgtgcggctactcgcgggccgaggtgatgcagcgaccctgcacctgcgacttcctgcacgggccgcgcacgcagcgccgcgctgccgcgcagatcgcgcaggcactgctgggcgccgaggagcgcaaagtggaaatcgccttctaccggaaagatgggagctgcttcctatgtctggtggatgtggtgcccgtgaagaacgaggatggggctgtcatcatgttcatcctcaatttcgaggtggtgatggagaaggacatggtggggtccccggctcatgacaccaaccaccggggcccccccaccagctggctggccccaggccgcgccaagaccttccgcctgaagctgcccgcgctgctggcgctgacggcccgggagtcgtcggtgcggtcgggcggcgcgggcggcgcgggcgccccgggggccgtggtggtggacgtggacctgacgcccgcggcacccagcagcgagtcgctggccctggacgaagtgacagccatggacaaccacgtggcagggctcgggcccgcggaggagcggcgtgcgctggtgggtcccggctctccgccccgcagcgcgcccggccagctcccatcgccccgggcgcacagcctcaaccccgacgcctcgggctccagctgcagcctggcccggacgcgctcccgagaaagctgcgccagcgtgcgccgcgcctcgtcggccgacgacatcgaggccatgcgcgccggggtgctgcccccgccaccgcgccacgccagcaccggggccatgcacccactgcgcagcggcttgctcaactccacctcggactccgacctcgtgcgctaccgcaccattagcaagattccccaaatcaccctcaactttgtggacctcaagggcgaccccttcttggcttcgcccaccagtgaccgtgagatcatagcacctaagataaaggagcgaacccacaatgtcactgagaaggtcacccaggtcctgtccctgggcgccgacgtgctgcctgagtacaagctgcaggcaccgcgcatccaccgctggaccatcctgcattacagccccttcaaggccgtgtgggactggctcatcctgctgctggtcatctacacggctgtcttcacaccctactcggctgccttcctgctgaaggagacggaagaaggcccgcctgctaccgagtgtggctacgcctgccagccgctggctgtggtggacctcatcgtggacatcatgttcattgtggacatcctcatcaacttccgcaccacctacgtcaatgccaacgaggaggtggtcagccaccccggccgcatcgccgtccactacttcaagggctggttcctcatcgacatggtggccgccatccccttcgacctgctcatcttcggctctggctctgaggagctgatcgggctgctgaagactgcgcggctgctgcggctggtgcgcgtggcgcggaagctggatcgctactcagagtacggcgcggccgtgctgttcttgctcatgtgcacctttgcgctcatcgcgcactggctagcctgcatctggtacgccatcggcaacatggagcagccacacatggactcacgcatcggctggctgcacaacctgggcgaccagataggcaaaccctacaacagcagcggcctgggcggcccctccatcaaggacaagtatgtgacggcgctctacttcaccttcagcagcctcaccagtgtgggcttcggcaacgtctctcccaacaccaactcagagaagatcttctccatctgcgtcatgctcattggctccctcatgtatgctagcatcttcggcaacgtgtcggccatcatccagcggctgtactcgggcacagcccgctaccacacacagatgctgcgggtgcgggagttcatccgcttccaccagatccccaatcccctgcgccagcgcctcgaggagtacttccagcacgcctggtcctacaccaacggcatcgacatgaacgcggtgctgaagggcttccctgagtgcctgcaggctgacatctgcctgcacctgaaccgctcactgctgcagcactgcaaacccttccgaggggccaccaagggctgccttcgggccctggccatgaagttcaagaccacacatgcaccgccaggggacacactggtgcatgctggggacctgctcaccgccctgtacttcatctcccggggctccatcgagatcctgcggggcgacgtcgtcgtggccatcctggggaagaatgacatctttggggagcctctgaacctgtatgcaaggcctggcaagtcgaacggggatgtgcgggccctcacctactgtgacctacacaagatccatcgggacgacctgctggaggtgctggacatgtaccctgagttctccgaccacttctggtccagcctggagatcaccttcaacctgcgagataccaacatgatcccgggctcccccggcagtacggagttagagggtggcttcagtcggcaacgcaagcgcaagttgtccttccgcaggcgcacggacaaggacacggagcagccaggggaggtgtcggccttggggccgggccgggcgggggcagggccgagtagccggggccggccgggggggccgtggggggagagcccgtccagtggcccctccagccctgagagcagtgaggatgagggcccaggccgcagctccagccccctccgcctggtgcccttctccagccccaggccccccggagagccgccgggtggggagcccctgatggaggactgcgagaagagcagcgacacttgcaaccccctgtcaggcgccttctcaggagtgtccaacattttcagcttctggggggacagtcggggccgccagtaccaggagctccctcgatgccccgcccccacccccagcctcctcaacatccccctctccagcccgggtcggcggccccggggcgacgtggagagcaggctggatgccctccagcgccagctcaacaggctggagacccggctgagtgcagacatggccactgtcctgcagctgctacagaggcagatgacgctggtcccgcccgcctacagtgctgtgaccaccccggggcctggccccacttccacatccccgctgttgcccgtcagccccctccccaccctcaccttggactcgctttctcaggtttcccagttcatggcgtatgaggagctgcccccgggggccccagagcttccccaagaaggccccacacgacgcctctccctaccgggccagctgggggccctcacctcccagcccctgcacagacacggctcggacccgggcagttagtggggctgcccagtgtggacacgtggctcacccagggatcaaggcgctgctgggccgctccccttggaggccctgctcaggaggccctgaccgtggaaggggagaggaactcgaaagcacagctcctcccccagcccttgggaccatcttctcctgcagtcccctgggccccagtgagaggggcaggggcagggccggcagtaggtggggcctgtggtccccccactgccctgagggcattagctggtctaactgcccggaggcacccggccctgggccttaggcacctcaaggacttttctgctatttactgctcttattgttaaggataataattaaggatcatatgaataattaatgaagatgctgatgactatgaataataaataattatcctgaggaga

SEQ ID NO: 837 - DNA, 3884 bp, Homo sapiens
  source 1..3884: mol_type = genomic DNA
  misc_feature 1..3884: note = cDNA of KCNH2 gene SNP c.3350G>T (p.Cys1117Phe)
atgccggtgcggaggggccacgtcgcgccgcagaacaccttcctggacaccatcatccgcaagtttgagggccagagccgtaagttcatcatcgccaacgctcgggtggagaactgcgccgtcatctactgcaacgacggcttctgcgagctgtgcggctactcgcgggccgaggtgatgcagcgaccctgcacctgcgacttcctgcacgggccgcgcacgcagcgccgcgctgccgcgcagatcgcgcaggcactgctgggcgccgaggagcgcaaagtggaaatcgccttctaccggaaagatgggagctgcttcctatgtctggtggatgtggtgcccgtgaagaacgaggatggggctgtcatcatgttcatcctcaatttcgaggtggtgatggagaaggacatggtggggtccccggctcatgacaccaaccaccggggcccccccaccagctggctggccccaggccgcgccaagaccttccgcctgaagctgcccgcgctgctggcgctgacggcccgggagtcgtcggtgcggtcgggcggcgcgggcggcgcgggcgccccgggggccgtggtggtggacgtggacctgacgcccgcggcacccagcagcgagtcgctggccctggacgaagtgacagccatggacaaccacgtggcagggctcgggcccgcggaggagcggcgtgcgctggtgggtcccggctctccgccccgcagcgcgcccggccagctcccatcgccccgggcgcacagcctcaaccccgacgcctcgggctccagctgcagcctggcccggacgcgctcccgagaaagctgcgccagcgtgcgccgcgcctcgtcggccgacgacatcgaggccatgcgcgccggggtgctgcccccgccaccgcgccacgccagcaccggggccatgcacccactgcgcagcggcttgctcaactccacctcggactccgacctcgtgcgctaccgcaccattagcaagattccccaaatcaccctcaactttgtggacctcaagggcgaccccttcttggcttcgcccaccagtgaccgtgagatcatagcacctaagataaaggagcgaacccacaatgtcactgagaaggtcacccaggtcctgtccctgggcgccgacgtgctgcctgagtacaagctgcaggcaccgcgcatccaccgctggaccatcctgcattacagccccttcaaggccgtgtgggactggctcatcctgctgctggtcatctacacggctgtcttcacaccctactcggctgccttcctgctgaaggagacggaagaaggcccgcctgctaccgagtgtggctacgcctgccagccgctggctgtggtggacctcatcgtggacatcatgttcattgtggacatcctcatcaacttccgcaccacctacgtcaatgccaacgaggaggtggtcagccaccccggccgcatcgccgtccactacttcaagggctggttcctcatcgacatggtggccgccatccccttcgacctgctcatcttcggctctggctctgaggagctgatcgggctgctgaagactgcgcggctgctgcggctggtgcgcgtggcgcggaagctggatcgctactcagagtacggcgcggccgtgctgttcttgctcatgtgcacctttgcgctcatcgcgcactggctagcctgcatctggtacgccatcggcaacatggagcagccacacatggactcacgcatcggctggctgcacaacctgggcgaccagataggcaaaccctacaacagcagcggcctgggcggcccctccatcaaggacaagtatgtgacggcgctctacttcaccttcagcagcctcaccagtgtgggcttcggcaacgtctctcccaacaccaactcagagaagatcttctccatctgcgtcatgctcattggctccctcatgtatgctagcatcttcggcaacgtgtcggccatcatccagcggctgtactcgggcacagcccgctaccacacacagatgctgcgggtgcgggagttcatccgcttccaccagatccccaatcccctgcgccagcgcctcgaggagtacttccagcacgcctggtcctacaccaacggcatcgacatgaacgcggtgctgaagggcttccctgagtgcctgcaggctgacatctgcctgcacctgaaccgctcactgctgcagcactgcaaacccttccgaggggccaccaagggctgccttcgggccctggccatgaagttcaagaccacacatgcaccgccaggggacacactggtgcatgctggggacctgctcaccgccctgtacttcatctcccggggctccatcgagatcctgcggggcgacgtcgtcgtggccatcctggggaagaatgacatctttggggagcctctgaacctgtatgcaaggcctggcaagtcgaacggggatgtgcgggccctcacctactgtgacctacacaagatccatcgggacgacctgctggaggtgctggacatgtaccctgagttctccgaccacttctggtccagcctggagatcaccttcaacctgcgagataccaacatgatcccgggctcccccggcagtacggagttagagggtggcttcagtcggcaacgcaagcgcaagttgtccttccgcaggcgcacggacaaggacacggagcagccaggggaggtgtcggccttggggccgggccgggcgggggcagggccgagtagccggggccggccgggggggccgtggggggagagcccgtccagtggcccctccagccctgagagcagtgaggatgagggcccaggccgcagctccagccccctccgcctggtgcccttctccagccccaggccccccggagagccgccgggtggggagcccctgatggaggactgcgagaagagcagcgacacttgcaaccccctgtcaggcgccttctcaggagtgtccaacattttcagcttctggggggacagtcggggccgccagtaccaggagctccctcgatgccccgcccccacccccagcctcctcaacatccccctctccagcccgggtcggcggccccggggcgacgtggagagcaggctggatgccctccagcgccagctcaacaggctggagacccggctgagtgcagacatggccactgtcctgcagctgctacagaggcagatgacgctggtcccgcccgcctacagtgctgtgaccaccccggggcctggccccacttccacatccccgctgttgcccgtcagccccctccccaccctcaccttggactcgctttctcaggtttcccagttcatggcgtttgaggagctgcccccgggggccccagagcttccccaagaaggccccacacgacgcctctccctaccgggccagctgggggccctcacctcccagcccctgcacagacacggctcggacccgggcagttagtggggctgcccagtgtggacacgtggctcacccagggatcaaggcgctgctgggccgctccccttggaggccctgctcaggaggccctgaccgtggaaggggagaggaactcgaaagcacagctcctcccccagcccttgggaccatcttctcctgcagtcccctgggccccagtgagaggggcaggggcagggccggcagtaggtggggcctgtggtccccccactgccctgagggcattagctggtctaactgcccggaggcacccggccctgggccttaggcacctcaaggacttttctgctatttactgctcttattgttaaggataataattaaggatcatatgaataattaatgaagatgctgatgactatgaataataaataattatcctgaggaga

SEQ ID NO: 838 - DNA, 3884 bp, Homo sapiens
  source 1..3884: mol_type = genomic DNA
  misc_feature 1..3884: note = cDNA of KCNH2 gene SNP c.3352G>A (p.Glu1118Lys)
atgccggtgcggaggggccacgtcgcgccgcagaacaccttcctggacaccatcatccgcaagtttgagggccagagccgtaagttcatcatcgccaacgctcgggtggagaactgcgccgtcatctactgcaacgacggcttctgcgagctgtgcggctactcgcgggccgaggtgatgcagcgaccctgcacctgcgacttcctgcacgggccgcgcacgcagcgccgcgctgccgcgcagatcgcgcaggcactgctgggcgccgaggagcgcaaagtggaaatcgccttctaccggaaagatgggagctgcttcctatgtctggtggatgtggtgcccgtgaagaacgaggatggggctgtcatcatgttcatcctcaatttcgaggtggtgatggagaaggacatggtggggtccccggctcatgacaccaaccaccggggcccccccaccagctggctggccccaggccgcgccaagaccttccgcctgaagctgcccgcgctgctggcgctgacggcccgggagtcgtcggtgcggtcgggcggcgcgggcggcgcgggcgccccgggggccgtggtggtggacgtggacctgacgcccgcggcacccagcagcgagtcgctggccctggacgaagtgacagccatggacaaccacgtggcagggctcgggcccgcggaggagcggcgtgcgctggtgggtcccggctctccgccccgcagcgcgcccggccagctcccatcgccccgggcgcacagcctcaaccccgacgcctcgggctccagctgcagcctggcccggacgcgctcccgagaaagctgcgccagcgtgcgccgcgcctcgtcggccgacgacatcgaggccatgcgcgccggggtgctgcccccgccaccgcgccacgccagcaccggggccatgcacccactgcgcagcggcttgctcaactccacctcggactccgacctcgtgcgctaccgcaccattagcaagattccccaaatcaccctcaactttgtggacctcaagggcgaccccttcttggcttcgcccaccagtgaccgtgagatcatagcacctaagataaaggagcgaacccacaatgtcactgagaaggtcacccaggtcctgtccctgggcgccgacgtgctgcctgagtacaagctgcaggcaccgcgcatccaccgctggaccatcctgcattacagccccttcaaggccgtgtgggactggctcatcctgctgctggtcatctacacggctgtcttcacaccctactcggctgccttcctgctgaaggagacggaagaaggcccgcctgctaccgagtgtggctacgcctgccagccgctggctgtggtggacctcatcgtggacatcatgttcattgtggacatcctcatcaacttccgcaccacctacgtcaatgccaacgaggaggtggtcagccaccccggccgcatcgccgtccactacttcaagggctggttcctcatcgacatggtggccgccatccccttcgacctgctcatcttcggctctggctctgaggagctgatcgggctgctgaagactgcgcggctgctgcggctggtgcgcgtggcgcggaagctggatcgctactcagagtacggcgcggccgtgctgttcttgctcatgtgcacctttgcgctcatcgcgcactggctagcctgcatctggtacgccatcggcaacatggagcagccacacatggactcacgcatcggctggctgcacaacctgggcgaccagataggcaaaccctacaacagcagcggcctgggcggcccctccatcaaggacaagtatgtgacggcgctctacttcaccttcagcagcctcaccagtgtgggcttcggcaacgtctctcccaacaccaactcagagaagatcttctccatctgcgtcatgctcattggctccctcatgtatgctagcatcttcggcaacgtgtcggccatcatccagcggctgtactcgggcacagcccgctaccacacacagatgctgcgggtgcgggagttcatccgcttccaccagatccccaatcccctgcgccagcgcctcgaggagtacttccagcacgcctggtcctacaccaacggcatcgacatgaacgcggtgctgaagggcttccctgagtgcctgcaggctgacatctgcctgcacctgaaccgctcactgctgcagcactgcaaacccttccgaggggccaccaagggctgccttcgggccctggccatgaagttcaagaccacacatgcaccgccaggggacacactggtgcatgctggggacctgctcaccgccctgtacttcatctcccggggctccatcgagatcctgcggggcgacgtcgtcgtggccatcctggggaagaatgacatctttggggagcctctgaacctgtatgcaaggcctggcaagtcgaacggggatgtgcgggccctcacctactgtgacctacacaagatccatcgggacgacctgctggaggtgctggacatgtaccctgagttctccgaccacttctggtccagcctggagatcaccttcaacctgcgagataccaacatgatcccgggctcccccggcagtacggagttagagggtggcttcagtcggcaacgcaagcgcaagttgtccttccgcaggcgcacggacaaggacacggagcagccaggggaggtgtcggccttggggccgggccgggcgggggcagggccgagtagccggggccggccgggggggccgtggggggagagcccgtccagtggcccctccagccctgagagcagtgaggatgagggcccaggccgcagctccagccccctccgcctggtgcccttctccagccccaggccccccggagagccgccgggtggggagcccctgatggaggactgcgagaagagcagcgacacttgcaaccccctgtcaggcgccttctcaggagtgtccaacattttcagcttctggggggacagtcggggccgccagtaccaggagctccctcgatgccccgcccccacccccagcctcctcaacatccccctctccagcccgggtcggcggccccggggcgacgtggagagcaggctggatgccctccagcgccagctcaacaggctggagacccggctgagtgcagacatggccactgtcctgcagctgctacagaggcagatgacgctggtcccgcccgcctacagtgctgtgaccaccccggggcctggccccacttccacatccccgctgttgcccgtcagccccctccccaccctcaccttggactcgctttctcaggtttcccagttcatggcgtgtaaggagctgcccccgggggccccagagcttccccaagaaggccccacacgacgcctctccctaccgggccagctgggggccctcacctcccagcccctgcacagacacggctcggacccgggcagttagtggggctgcccagtgtggacacgtggctcacccagggatcaaggcgctgctgggccgctccccttggaggccctgctcaggaggccctgaccgtggaaggggagaggaactcgaaagcacagctcctcccccagcccttgggaccatcttctcctgcagtcccctgggccccagtgagaggggcaggggcagggccggcagtaggtggggcctgtggtccccccactgccctgagggcattagctggtctaactgcccggaggcacccggccctgggccttaggcacctcaaggacttttctgctatttactgctcttattgttaaggataataattaaggatcatatgaataattaatgaagatgctgatgactatgaataataaataattatcctgaggaga

SEQ ID NO: 839 - DNA, 3884 bp, Homo sapiens
  source 1..3884: mol_type = genomic DNA
  misc_feature 1..3884: note = cDNA of KCNH2 gene SNP c.3355G>C (p.Glu1119Gln)
atgccggtgcggaggggccacgtcgcgccgcagaacaccttcctggacaccatcatccgcaagtttgagggccagagccgtaagttcatcatcgccaacgctcgggtggagaactgcgccgtcatctactgcaacgacggcttctgcgagctgtgcggctactcgcgggccgaggtgatgcagcgaccctgcacctgcgacttcctgcacgggccgcgcacgcagcgccgcgctgccgcgcagatcgcgcaggcactgctgggcgccgaggagcgcaaagtggaaatcgccttctaccggaaagatgggagctgcttcctatgtctggtggatgtggtgcccgtgaagaacgaggatggggctgtcatcatgttcatcctcaatttcgaggtggtgatggagaaggacatggtggggtccccggctcatgacaccaaccaccggggcccccccaccagctggctggccccaggccgcgccaagaccttccgcctgaagctgcccgcgctgctggcgctgacggcccgggagtcgtcggtgcggtcgggcggcgcgggcggcgcgggcgccccgggggccgtggtggtggacgtggacctgacgcccgcggcacccagcagcgagtcgctggccctggacgaagtgacagccatggacaaccacgtggcagggctcgggcccgcggaggagcggcgtgcgctggtgggtcccggctctccgccccgcagcgcgcccggccagctcccatcgccccgggcgcacagcctcaaccccgacgcctcgggctccagctgcagcctggcccggacgcgctcccgagaaagctgcgccagcgtgcgccgcgcctcgtcggccgacgacatcgaggccatgcgcgccggggtgctgcccccgccaccgcgccacgccagcaccggggccatgcacccactgcgcagcggcttgctcaactccacctcggactccgacctcgtgcgctaccgcaccattagcaagattccccaaatcaccctcaactttgtggacctcaagggcgaccccttcttggcttcgcccaccagtgaccgtgagatcatagcacctaagataaaggagcgaacccacaatgtcactgagaaggtcacccaggtcctgtccctgggcgccgacgtgctgcctgagtacaagctgcaggcaccgcgcatccaccgctggaccatcctgcattacagccccttcaaggccgtgtgggactggctcatcctgctgctggtcatctacacggctgtcttcacaccctactcggctgccttcctgctgaaggagacggaagaaggcccgcctgctaccgagtgtggctacgcctgccagccgctggctgtggtggacctcatcgtggacatcatgttcattgtggacatcctcatcaacttccgcaccacctacgtcaatgccaacgaggaggtggtcagccaccccggccgcatcgccgtccactacttcaagggctggttcctcatcgacatggtggccgccatccccttcgacctgctcatcttcggctctggctctgaggagctgatcgggctgctgaagactgcgcggctgctgcggctggtgcgcgtggcgcggaagctggatcgctactcagagtacggcgcggccgtgctgttcttgctcatgtgcacctttgcgctcatcgcgcactggctagcctgcatctggtacgccatcggcaacatggagcagccacacatggactcacgcatcggctggctgcacaacctgggcgaccagataggcaaaccctacaacagcagcggcctgggcggcccctccatcaaggacaagtatgtgacggcgctctacttcaccttcagcagcctcaccagtgtgggcttcggcaacgtctctcccaacaccaactcagagaagatcttctccatctgcgtcatgctcattggctccctcatgtatgctagcatcttcggcaacgtgtcggccatcatccagcggctgtactcgggcacagcccgctaccacacacagatgctgcgggtgcgggagttcatccgcttccaccagatccccaatcccctgcgccagcgcctcgaggagtacttccagcacgcctggtcctacaccaacggcatcgacatgaacgcggtgctgaagggcttccctgagtgcctgcaggctgacatctgcctgcacctgaaccgctcactgctgcagcactgcaaacccttccgaggggccaccaagggctgccttcgggccctggccatgaagttcaagaccacacatgcaccgccaggggacacactggtgcatgctggggacctgctcaccgccctgtacttcatctcccggggctccatcgagatcctgcggggcgacgtcgtcgtggccatcctggggaagaatgacatctttggggagcctctgaacctgtatgcaaggcctggcaagtcgaacggggatgtgcgggccctcacctactgtgacctacacaagatccatcgggacgacctgctggaggtgctggacatgtaccctgagttctccgaccacttctggtccagcctggagatcaccttcaacctgcgagataccaacatgatcccgggctcccccggcagtacggagttagagggtggcttcagtcggcaacgcaagcgcaagttgtccttccgcaggcgcacggacaaggacacggagcagccaggggaggtgtcggccttggggccgggccgggcgggggcagggccgagtagccggggccggccgggggggccgtggggggagagcccgtccagtggcccctccagccctgagagcagtgaggatgagggcccaggccgcagctccagccccctccgcctggtgcccttctccagccccaggccccccggagagccgccgggtggggagcccctgatggaggactgcgagaagagcagcgacacttgcaaccccctgtcaggcgccttctcaggagtgtccaacattttcagcttctggggggacagtcggggccgccagtaccaggagctccctcgatgccccgcccccacccccagcctcctcaacatccccctctccagcccgggtcggcggccccggggcgacgtggagagcaggctggatgccctccagcgccagctcaacaggctggagacccggctgagtgcagacatggccactgtcctgcagctgctacagaggcagatgacgctggtcccgcccgcctacagtgctgtgaccaccccggggcctggccccacttccacatccccgctgttgcccgtcagccccctccccaccctcaccttggactcgctttctcaggtttcccagttcatggcgtgtgagcagctgcccccgggggccccagagcttccccaagaaggccccacacgacgcctctccctaccgggccagctgggggccctcacctcccagcccctgcacagacacggctcggacccgggcagttagtggggctgcccagtgtggacacgtggctcacccagggatcaaggcgctgctgggccgctccccttggaggccctgctcaggaggccctgaccgtggaaggggagaggaactcgaaagcacagctcctcccccagcccttgggaccatcttctcctgcagtcccctgggccccagtgagaggggcaggggcagggccggcagtaggtggggcctgtggtccccccactgccctgagggcattagctggtctaactgcccggaggcacccggccctgggccttaggcacctcaaggacttttctgctatttactgctcttattgttaaggataataattaaggatcatatgaataattaatgaagatgctgatgactatgaataataaataattatcctgaggaga

SEQ ID NO: 840 - DNA, 3884 bp, Homo sapiens
  source 1..3884: mol_type = genomic DNA
  misc_feature 1..3884: note = cDNA of KCNH2 gene SNP c.3358C>G (p.Leu1120Val)
atgccggtgcggaggggccacgtcgcgccgcagaacaccttcctggacaccatcatccgcaagtttgagggccagagccgtaagttcatcatcgccaacgctcgggtggagaactgcgccgtcatctactgcaacgacggcttctgcgagctgtgcggctactcgcgggccgaggtgatgcagcgaccctgcacctgcgacttcctgcacgggccgcgcacgcagcgccgcgctgccgcgcagatcgcgcaggcactgctgggcgccgaggagcgcaaagtggaaatcgccttctaccggaaagatgggagctgcttcctatgtctggtggatgtggtgcccgtgaagaacgaggatggggctgtcatcatgttcatcctcaatttcgaggtggtgatggagaaggacatggtggggtccccggctcatgacaccaaccaccggggcccccccaccagctggctggccccaggccgcgccaagaccttccgcctgaagctgcccgcgctgctggcgctgacggcccgggagtcgtcggtgcggtcgggcggcgcgggcggcgcgggcgccccgggggccgtggtggtggacgtggacctgacgcccgcggcacccagcagcgagtcgctggccctggacgaagtgacagccatggacaaccacgtggcagggctcgggcccgcggaggagcggcgtgcgctggtgggtcccggctctccgccccgcagcgcgcccggccagctcccatcgccccgggcgcacagcctcaaccccgacgcctcgggctccagctgcagcctggcccggacgcgctcccgagaaagctgcgccagcgtgcgccgcgcctcgtcggccgacgacatcgaggccatgcgcgccggggtgctgcccccgccaccgcgccacgccagcaccggggccatgcacccactgcgcagcggcttgctcaactccacctcggactccgacctcgtgcgctaccgcaccattagcaagattccccaaatcaccctcaactttgtggacctcaagggcgaccccttcttggcttcgcccaccagtgaccgtgagatcatagcacctaagataaaggagcgaacccacaatgtcactgagaaggtcacccaggtcctgtccctgggcgccgacgtgctgcctgagtacaagctgcaggcaccgcgcatccaccgctggaccatcctgcattacagccccttcaaggccgtgtgggactggctcatcctgctgctggtcatctacacggctgtcttcacaccctactcggctgccttcctgctgaaggagacggaagaaggcccgcctgctaccgagtgtggctacgcctgccagccgctggctgtggtggacctcatcgtggacatcatgttcattgtggacatcctcatcaacttccgcaccacctacgtcaatgccaacgaggaggtggtcagccaccccggccgcatcgccgtccactacttcaagggctggttcctcatcgacatggtggccgccatccccttcgacctgctcatcttcggctctggctctgaggagctgatcgggctgctgaagactgcgcggctgctgcggctggtgcgcgtggcgcggaagctggatcgctactcagagtacggcgcggccgtgctgttcttgctcatgtgcacctttgcgctcatcgcgcactggctagcctgcatctggtacgccatcggcaacatggagcagccacacatggactcacgcatcggctggctgcacaacctgggcgaccagataggcaaaccctacaacagcagcggcctgggcggcccctccatcaaggacaagtatgtgacggcgctctacttcaccttcagcagcctcaccagtgtgggcttcggcaacgtctctcccaacaccaactcagagaagatcttctccatctgcgtcatgctcattggctccctcatgtatgctagcatcttcggcaacgtgtcggccatcatccagcggctgtactcgggcacagcccgctaccacacacagatgctgcgggtgcgggagttcatccgcttccaccagatccccaatcccctgcgccagcgcctcgaggagtacttccagcacgcctggtcctacaccaacggcatcgacatgaacgcggtgctgaagggcttccctgagtgcctgcaggctgacatctgcctgcacctgaaccgctcactgctgcagcactgcaaacccttccgaggggccaccaagggctgccttcgggccctggccatgaagttcaagaccacacatgcaccgccaggggacacactggtgcatgctggggacctgctcaccgccctgtacttcatctcccggggctccatcgagatcctgcggggcgacgtcgtcgtggccatcctggggaagaatgacatctttggggagcctctgaacctgtatgcaaggcctggcaagtcgaacggggatgtgcgggccctcacctactgtgacctacacaagatccatcgggacgacctgctggaggtgctggacatgtaccctgagttctccgaccacttctggtccagcctggagatcaccttcaacctgcgagataccaacatgatcccgggctcccccggcagtacggagttagagggtggcttcagtcggcaacgcaagcgcaagttgtccttccgcaggcgcacggacaaggacacggagcagccaggggaggtgtcggccttggggccgggccgggcgggggcagggccgagtagccggggccggccgggggggccgtggggggagagcccgtccagtggcccctccagccctgagagcagtgaggatgagggcccaggccgcagctccagccccctccgcctggtgcccttctccagccccaggccccccggagagccgccgggtggggagcccctgatggaggactgcgagaagagcagcgacacttgcaaccccctgtcaggcgccttctcaggagtgtccaacattttcagcttctggggggacagtcggggccgccagtaccaggagctccctcgatgccccgcccccacccccagcctcctcaacatccccctctccagcccgggtcggcggccccggggcgacgtggagagcaggctggatgccctccagcgccagctcaacaggctggagacccggctgagtgcagacatggccactgtcctgcagctgctacagaggcagatgacgctggtcccgcccgcctacagtgctgtgaccaccccggggcctggccccacttccacatccccgctgttgcccgtcagccccctccccaccctcaccttggactcgctttctcaggtttcccagttcatggcgtgtgaggaggtgcccccgggggccccagagcttccccaagaaggccccacacgacgcctctccctaccgggccagctgggggccctcacctcccagcccctgcacagacacggctcggacccgggcagttagtggggctgcccagtgtggacacgtggctcacccagggatcaaggcgctgctgggccgctccccttggaggccctgctcaggaggccctgaccgtggaaggggagaggaactcgaaagcacagctcctcccccagcccttgggaccatcttctcctgcagtcccctgggccccagtgagaggggcaggggcagggccggcagtaggtggggcctgtggtccccccactgccctgagggcattagctggtctaactgcccggaggcacccggccctgggccttaggcacctcaaggacttttctgctatttactgctcttattgttaaggataataattaaggatcatatgaataattaatgaagatgctgatgactatgaataataaataattatcctgaggaga

SEQ ID NO: 841 - DNA, 3884 bp, Homo sapiens
  source 1..3884: mol_type = genomic DNA
  misc_feature 1..3884: note = cDNA of KCNH2 gene SNP c.3361C>T (p.Pro1121Ser)
atgccggtgcggaggggccacgtcgcgccgcagaacaccttcctggacaccatcatccgcaagtttgagggccagagccgtaagttcatcatcgccaacgctcgggtggagaactgcgccgtcatctactgcaacgacggcttctgcgagctgtgcggctactcgcgggccgaggtgatgcagcgaccctgcacctgcgacttcctgcacgggccgcgcacgcagcgccgcgctgccgcgcagatcgcgcaggcactgctgggcgccgaggagcgcaaagtggaaatcgccttctaccggaaagatgggagctgcttcctatgtctggtggatgtggtgcccgtgaagaacgaggatggggctgtcatcatgttcatcctcaatttcgaggtggtgatggagaaggacatggtggggtccccggctcatgacaccaaccaccggggcccccccaccagctggctggccccaggccgcgccaagaccttccgcctgaagctgcccgcgctgctggcgctgacggcccgggagtcgtcggtgcggtcgggcggcgcgggcggcgcgggcgccccgggggccgtggtggtggacgtggacctgacgcccgcggcacccagcagcgagtcgctggccctggacgaagtgacagccatggacaaccacgtggcagggctcgggcccgcggaggagcggcgtgcgctggtgggtcccggctctccgccccgcagcgcgcccggccagctcccatcgccccgggcgcacagcctcaaccccgacgcctcgggctccagctgcagcctggcccggacgcgctcccgagaaagctgcgccagcgtgcgccgcgcctcgtcggccgacgacatcgaggccatgcgcgccggggtgctgcccccgccaccgcgccacgccagcaccggggccatgcacccactgcgcagcggcttgctcaactccacctcggactccgacctcgtgcgctaccgcaccattagcaagattccccaaatcaccctcaactttgtggacctcaagggcgaccccttcttggcttcgcccaccagtgaccgtgagatcatagcacctaagataaaggagcgaacccacaatgtcactgagaaggtcacccaggtcctgtccctgggcgccgacgtgctgcctgagtacaagctgcaggcaccgcgcatccaccgctggaccatcctgcattacagccccttcaaggccgtgtgggactggctcatcctgctgctggtcatctacacggctgtcttcacaccctactcggctgccttcctgctgaaggagacggaagaaggcccgcctgctaccgagtgtggctacgcctgccagccgctggctgtggtggacctcatcgtggacatcatgttcattgtggacatcctcatcaacttccgcaccacctacgtcaatgccaacgaggaggtggtcagccaccccggccgcatcgccgtccactacttcaagggctggttcctcatcgacatggtggccgccatccccttcgacctgctcatcttcggctctggctctgaggagctgatcgggctgctgaagactgcgcggctgctgcggctggtgcgcgtggcgcggaagctggatcgctactcagagtacggcgcggccgtgctgttcttgctcatgtgcacctttgcgctcatcgcgcactggctagcctgcatctggtacgccatcggcaacatggagcagccacacatggactcacgcatcggctggctgcacaacctgggcgaccagataggcaaaccctacaacagcagcggcctgggcggcccctccatcaaggacaagtatgtgacggcgctctacttcaccttcagcagcctcaccagtgtgggcttcggcaacgtctctcccaacaccaactcagagaagatcttctccatctgcgtcatgctcattggctccctcatgtatgctagcatcttcggcaacgtgtcggccatcatccagcggctgtactcgggcacagcccgctaccacacacagatgctgcgggtgcgggagttcatccgcttccaccagatccccaatcccctgcgccagcgcctcgaggagtacttccagcacgcctggtcctacaccaacggcatcgacatgaacgcggtgctgaagggcttccctgagtgcctgcaggctgacatctgcctgcacctgaaccgctcactgctgcagcactgcaaacccttccgaggggccaccaagggctgccttcgggccctggccatgaagttcaagaccacacatgcaccgccaggggacacactggtgcatgctggggacctgctcaccgccctgtacttcatctcccggggctccatcgagatcctgcggggcgacgtcgtcgtggccatcctggggaagaatgacatctttggggagcctctgaacctgtatgcaaggcctggcaagtcgaacggggatgtgcgggccctcacctactgtgacctacacaagatccatcgggacgacctgctggaggtgctggacatgtaccctgagttctccgaccacttctggtccagcctggagatcaccttcaacctgcgagataccaacatgatcccgggctcccccggcagtacggagttagagggtggcttcagtcggcaacgcaagcgcaagttgtccttccgcaggcgcacggacaaggacacggagcagccaggggaggtgtcggccttggggccgggccgggcgggggcagggccgagtagccggggccggccgggggggccgtggggggagagcccgtccagtggcccctccagccctgagagcagtgaggatgagggcccaggccgcagctccagccccctccgcctggtgcccttctccagccccaggccccccggagagccgccgggtggggagcccctgatggaggactgcgagaagagcagcgacacttgcaaccccctgtcaggcgccttctcaggagtgtccaacattttcagcttctggggggacagtcggggccgccagtaccaggagctccctcgatgccccgcccccacccccagcctcctcaacatccccctctccagcccgggtcggcggccccggggcgacgtggagagcaggctggatgccctccagcgccagctcaacaggctggagacccggctgagtgcagacatggccactgtcctgcagctgctacagaggcagatgacgctggtcccgcccgcctacagtgctgtgaccaccccggggcctggccccacttccacatccccgctgttgcccgtcagccccctccccaccctcaccttggactcgctttctcaggtttcccagttcatggcgtgtgaggagctgtccccgggggccccagagcttccccaagaaggccccacacgacgcctctccctaccgggccagctgggggccctcacctcccagcccctgcacagacacggctcggacccgggcagttagtggggctgcccagtgtggacacgtggctcacccagggatcaaggcgctgctgggccgctccccttggaggccctgctcaggaggccctgaccgtggaaggggagaggaactcgaaagcacagctcctcccccagcccttgggaccatcttctcctgcagtcccctgggccccagtgagaggggcaggggcagggccggcagtaggtggggcctgtggtccccccactgccctgagggcattagctggtctaactgcccggaggcacccggccctgggccttaggcacctcaaggacttttctgctatttactgctcttattgttaaggataataattaaggatcatatgaataattaatgaagatgctgatgactatgaataataaataattatcctgaggaga

SEQ ID NO: 842 - DNA, 3884 bp, Homo sapiens
  source 1..3884: mol_type = genomic DNA
  misc_feature 1..3884: note = cDNA of KCNH2 gene SNP c.3365C>G (p.Pro1122Arg)
atgccggtgcggaggggccacgtcgcgccgcagaacaccttcctggacaccatcatccgcaagtttgagggccagagccgtaagttcatcatcgccaacgctcgggtggagaactgcgccgtcatctactgcaacgacggcttctgcgagctgtgcggctactcgcgggccgaggtgatgcagcgaccctgcacctgcgacttcctgcacgggccgcgcacgcagcgccgcgctgccgcgcagatcgcgcaggcactgctgggcgccgaggagcgcaaagtggaaatcgccttctaccggaaagatgggagctgcttcctatgtctggtggatgtggtgcccgtgaagaacgaggatggggctgtcatcatgttcatcctcaatttcgaggtggtgatggagaaggacatggtggggtccccggctcatgacaccaaccaccggggcccccccaccagctggctggccccaggccgcgccaagaccttccgcctgaagctgcccgcgctgctggcgctgacggcccgggagtcgtcggtgcggtcgggcggcgcgggcggcgcgggcgccccgggggccgtggtggtggacgtggacctgacgcccgcggcacccagcagcgagtcgctggccctggacgaagtgacagccatggacaaccacgtggcagggctcgggcccgcggaggagcggcgtgcgctggtgggtcccggctctccgccccgcagcgcgcccggccagctcccatcgccccgggcgcacagcctcaaccccgacgcctcgggctccagctgcagcctggcccggacgcgctcccgagaaagctgcgccagcgtgcgccgcgcctcgtcggccgacgacatcgaggccatgcgcgccggggtgctgcccccgccaccgcgccacgccagcaccggggccatgcacccactgcgcagcggcttgctcaactccacctcggactccgacctcgtgcgctaccgcaccattagcaagattccccaaatcaccctcaactttgtggacctcaagggcgaccccttcttggcttcgcccaccagtgaccgtgagatcatagcacctaagataaaggagcgaacccacaatgtcactgagaaggtcacccaggtcctgtccctgggcgccgacgtgctgcctgagtacaagctgcaggcaccgcgcatccaccgctggaccatcctgcattacagccccttcaaggccgtgtgggactggctcatcctgctgctggtcatctacacggctgtcttcacaccctactcggctgccttcctgctgaaggagacggaagaaggcccgcctgctaccgagtgtggctacgcctgccagccgctggctgtggtggacctcatcgtggacatcatgttcattgtggacatcctcatcaacttccgcaccacctacgtcaatgccaacgaggaggtggtcagccaccccggccgcatcgccgtccactacttcaagggctggttcctcatcgacatggtggccgccatccccttcgacctgctcatcttcggctctggctctgaggagctgatcgggctgctgaagactgcgcggctgctgcggctggtgcgcgtggcgcggaagctggatcgctactcagagtacggcgcggccgtgctgttcttgctcatgtgcacctttgcgctcatcgcgcactggctagcctgcatctggtacgccatcggcaacatggagcagccacacatggactcacgcatcggctggctgcacaacctgggcgaccagataggcaaaccctacaacagcagcggcctgggcggcccctccatcaaggacaagtatgtgacggcgctctacttcaccttcagcagcctcaccagtgtgggcttcggcaacgtctctcccaacaccaactcagagaagatcttctccatctgcgtcatgctcattggctccctcatgtatgctagcatcttcggcaacgtgtcggccatcatccagcggctgtactcgggcacagcccgctaccacacacagatgctgcgggtgcgggagttcatccgcttccaccagatccccaatcccctgcgccagcgcctcgaggagtacttccagcacgcctggtcctacaccaacggcatcgacatgaacgcggtgctgaagggcttccctgagtgcctgcaggctgacatctgcctgcacctgaaccgctcactgctgcagcactgcaaacccttccgaggggccaccaagggctgccttcgggccctggccatgaagttcaagaccacacatgcaccgccaggggacacactggtgcatgctggggacctgctcaccgccctgtacttcatctcccggggctccatcgagatcctgcggggcgacgtcgtcgtggccatcctggggaagaatgacatctttggggagcctctgaacctgtatgcaaggcctggcaagtcgaacggggatgtgcgggccctcacctactgtgacctacacaagatccatcgggacgacctgctggaggtgctggacatgtaccctgagttctccgaccacttctggtccagcctggagatcaccttcaacctgcgagataccaacatgatcccgggctcccccggcagtacggagttagagggtggcttcagtcggcaacgcaagcgcaagttgtccttccgcaggcgcacggacaaggacacggagcagccaggggaggtgtcggccttggggccgggccgggcgggggcagggccgagtagccggggccggccgggggggccgtggggggagagcccgtccagtggcccctccagccctgagagcagtgaggatgagggcccaggccgcagctccagccccctccgcctggtgcccttctccagccccaggccccccggagagccgccgggtggggagcccctgatggaggactgcgagaagagcagcgacacttgcaaccccctgtcaggcgccttctcaggagtgtccaacattttcagcttctggggggacagtcggggccgccagtaccaggagctccctcgatgccccgcccccacccccagcctcctcaacatccccctctccagcccgggtcggcggccccggggcgacgtggagagcaggctggatgccctccagcgccagctcaacaggctggagacccggctgagtgcagacatggccactgtcctgcagctgctacagaggcagatgacgctggtcccgcccgcctacagtgctgtgaccaccccggggcctggccccacttccacatccccgctgttgcccgtcagccccctccccaccctcaccttggactcgctttctcaggtttcccagttcatggcgtgtgaggagctgccccggggggccccagagcttccccaagaaggccccacacgacgcctctccctaccgggccagctgggggccctcacctcccagcccctgcacagacacggctcggacccgggcagttagtggggctgcccagtgtggacacgtggctcacccagggatcaaggcgctgctgggccgctccccttggaggccctgctcaggaggccctgaccgtggaaggggagaggaactcgaaagcacagctcctcccccagcccttgggaccatcttctcctgcagtcccctgggccccagtgagaggggcaggggcagggccggcagtaggtggggcctgtggtccccccactgccctgagggcattagctggtctaactgcccggaggcacccggccctgggccttaggcacctcaaggacttttctgctatttactgctcttattgttaaggataataattaaggatcatatgaataattaatgaagatgctgatgactatgaataataaataattatcctgaggaga

SEQ ID NO: 843 - DNA, 3884 bp, Homo sapiens
  source 1..3884: mol_type = genomic DNA
  misc_feature 1..3884: note = cDNA of KCNH2 gene SNP c.3365C>T (p.Pro1122Leu)
atgccggtgcggaggggccacgtcgcgccgcagaacaccttcctggacaccatcatccgcaagtttgagggccagagccgtaagttcatcatcgccaacgctcgggtggagaactgcgccgtcatctactgcaacgacggcttctgcgagctgtgcggctactcgcgggccgaggtgatgcagcgaccctgcacctgcgacttcctgcacgggccgcgcacgcagcgccgcgctgccgcgcagatcgcgcaggcactgctgggcgccgaggagcgcaaagtggaaatcgccttctaccggaaagatgggagctgcttcctatgtctggtggatgtggtgcccgtgaagaacgaggatggggctgtcatcatgttcatcctcaatttcgaggtggtgatggagaaggacatggtggggtccccggctcatgacaccaaccaccggggcccccccaccagctggctggccccaggccgcgccaagaccttccgcctgaagctgcccgcgctgctggcgctgacggcccgggagtcgtcggtgcggtcgggcggcgcgggcggcgcgggcgccccgggggccgtggtggtggacgtggacctgacgcccgcggcacccagcagcgagtcgctggccctggacgaagtgacagccatggacaaccacgtggcagggctcgggcccgcggaggagcggcgtgcgctggtgggtcccggctctccgccccgcagcgcgcccggccagctcccatcgccccgggcgcacagcctcaaccccgacgcctcgggctccagctgcagcctggcccggacgcgctcccgagaaagctgcgccagcgtgcgccgcgcctcgtcggccgacgacatcgaggccatgcgcgccggggtgctgcccccgccaccgcgccacgccagcaccggggccatgcacccactgcgcagcggcttgctcaactccacctcggactccgacctcgtgcgctaccgcaccattagcaagattccccaaatcaccctcaactttgtggacctcaagggcgaccccttcttggcttcgcccaccagtgaccgtgagatcatagcacctaagataaaggagcgaacccacaatgtcactgagaaggtcacccaggtcctgtccctgggcgccgacgtgctgcctgagtacaagctgcaggcaccgcgcatccaccgctggaccatcctgcattacagccccttcaaggccgtgtgggactggctcatcctgctgctggtcatctacacggctgtcttcacaccctactcggctgccttcctgctgaaggagacggaagaaggcccgcctgctaccgagtgtggctacgcctgccagccgctggctgtggtggacctcatcgtggacatcatgttcattgtggacatcctcatcaacttccgcaccacctacgtcaatgccaacgaggaggtggtcagccaccccggccgcatcgccgtccactacttcaagggctggttcctcatcgacatggtggccgccatccccttcgacctgctcatcttcggctctggctctgaggagctgatcgggctgctgaagactgcgcggctgctgcggctggtgcgcgtggcgcggaagctggatcgctactcagagtacggcgcggccgtgctgttcttgctcatgtgcacctttgcgctcatcgcgcactggctagcctgcatctggtacgccatcggcaacatggagcagccacacatggactcacgcatcggctggctgcacaacctgggcgaccagataggcaaaccctacaacagcagcggcctgggcggcccctccatcaaggacaagtatgtgacggcgctctacttcaccttcagcagcctcaccagtgtgggcttcggcaacgtctctcccaacaccaactcagagaagatcttctccatctgcgtcatgctcattggctccctcatgtatgctagcatcttcggcaacgtgtcggccatcatccagcggctgtactcgggcacagcccgctaccacacacagatgctgcgggtgcgggagttcatccgcttccaccagatccccaatcccctgcgccagcgcctcgaggagtacttccagcacgcctggtcctacaccaacggcatcgacatgaacgcggtgctgaagggcttccctgagtgcctgcaggctgacatctgcctgcacctgaaccgctcactgctgcagcactgcaaacccttccgaggggccaccaagggctgccttcgggccctggccatgaagttcaagaccacacatgcaccgccaggggacacactggtgcatgctggggacctgctcaccgccctgtacttcatctcccggggctccatcgagatcctgcggggcgacgtcgtcgtggccatcctggggaagaatgacatctttggggagcctctgaacctgtatgcaaggcctggcaagtcgaacggggatgtgcgggccctcacctactgtgacctacacaagatccatcgggacgacctgctggaggtgctggacatgtaccctgagttctccgaccacttctggtccagcctggagatcaccttcaacctgcgagataccaacatgatcccgggctcccccggcagtacggagttagagggtggcttcagtcggcaacgcaagcgcaagttgtccttccgcaggcgcacggacaaggacacggagcagccaggggaggtgtcggccttggggccgggccgggcgggggcagggccgagtagccggggccggccgggggggccgtggggggagagcccgtccagtggcccctccagccctgagagcagtgaggatgagggcccaggccgcagctccagccccctccgcctggtgcccttctccagccccaggccccccggagagccgccgggtggggagcccctgatggaggactgcgagaagagcagcgacacttgcaaccccctgtcaggcgccttctcaggagtgtccaacattttcagcttctggggggacagtcggggccgccagtaccaggagctccctcgatgccccgcccccacccccagcctcctcaacatccccctctccagcccgggtcggcggccccggggcgacgtggagagcaggctggatgccctccagcgccagctcaacaggctggagacccggctgagtgcagacatggccactgtcctgcagctgctacagaggcagatgacgctggtcccgcccgcctacagtgctgtgaccaccccggggcctggccccacttccacatccccgctgttgcccgtcagccccctccccaccctcaccttggactcgctttctcaggtttcccagttcatggcgtgtgaggagctgcccctgggggccccagagcttccccaagaaggccccacacgacgcctctccctaccgggccagctgggggccctcacctcccagcccctgcacagacacggctcggacccgggcagttagtggggctgcccagtgtggacacgtggctcacccagggatcaaggcgctgctgggccgctccccttggaggccctgctcaggaggccctgaccgtggaaggggagaggaactcgaaagcacagctcctcccccagcccttgggaccatcttctcctgcagtcccctgggccccagtgagaggggcaggggcagggccggcagtaggtggggcctgtggtccccccactgccctgagggcattagctggtctaactgcccggaggcacccggccctgggccttaggcacctcaaggacttttctgctatttactgctcttattgttaaggataataattaaggatcatatgaataattaatgaagatgctgatgactatgaataataaataattatcctgaggaga

SEQ ID NO: 844 - DNA, 3884 bp, Homo sapiens
  source 1..3884: mol_type = genomic DNA
  misc_feature 1..3884: note = cDNA of KCNH2 gene SNP c.3379C>T (p.Leu1127Phe)
atgccggtgcggaggggccacgtcgcgccgcagaacaccttcctggacaccatcatccgcaagtttgagggccagagccgtaagttcatcatcgccaacgctcgggtggagaactgcgccgtcatctactgcaacgacggcttctgcgagctgtgcggctactcgcgggccgaggtgatgcagcgaccctgcacctgcgacttcctgcacgggccgcgcacgcagcgccgcgctgccgcgcagatcgcgcaggcactgctgggcgccgaggagcgcaaagtggaaatcgccttctaccggaaagatgggagctgcttcctatgtctggtggatgtggtgcccgtgaagaacgaggatggggctgtcatcatgttcatcctcaatttcgaggtggtgatggagaaggacatggtggggtccccggctcatgacaccaaccaccggggcccccccaccagctggctggccccaggccgcgccaagaccttccgcctgaagctgcccgcgctgctggcgctgacggcccgggagtcgtcggtgcggtcgggcggcgcgggcggcgcgggcgccccgggggccgtggtggtggacgtggacctgacgcccgcggcacccagcagcgagtcgctggccctggacgaagtgacagccatggacaaccacgtggcagggctcgggcccgcggaggagcggcgtgcgctggtgggtcccggctctccgccccgcagcgcgcccggccagctcccatcgccccgggcgcacagcctcaaccccgacgcctcgggctccagctgcagcctggcccggacgcgctcccgagaaagctgcgccagcgtgcgccgcgcctcgtcggccgacgacatcgaggccatgcgcgccggggtgctgcccccgccaccgcgccacgccagcaccggggccatgcacccactgcgcagcggcttgctcaactccacctcggactccgacctcgtgcgctaccgcaccattagcaagattccccaaatcaccctcaactttgtggacctcaagggcgaccccttcttggcttcgcccaccagtgaccgtgagatcatagcacctaagataaaggagcgaacccacaatgtcactgagaaggtcacccaggtcctgtccctgggcgccgacgtgctgcctgagtacaagctgcaggcaccgcgcatccaccgctggaccatcctgcattacagccccttcaaggccgtgtgggactggctcatcctgctgctggtcatctacacggctgtcttcacaccctactcggctgccttcctgctgaaggagacggaagaaggcccgcctgctaccgagtgtggctacgcctgccagccgctggctgtggtggacctcatcgtggacatcatgttcattgtggacatcctcatcaacttccgcaccacctacgtcaatgccaacgaggaggtggtcagccaccccggccgcatcgccgtccactacttcaagggctggttcctcatcgacatggtggccgccatccccttcgacctgctcatcttcggctctggctctgaggagctgatcgggctgctgaagactgcgcggctgctgcggctggtgcgcgtggcgcggaagctggatcgctactcagagtacggcgcggccgtgctgttcttgctcatgtgcacctttgcgctcatcgcgcactggctagcctgcatctggtacgccatcggcaacatggagcagccacacatggactcacgcatcggctggctgcacaacctgggcgaccagataggcaaaccctacaacagcagcggcctgggcggcccctccatcaaggacaagtatgtgacggcgctctacttcaccttcagcagcctcaccagtgtgggcttcggcaacgtctctcccaacaccaactcagagaagatcttctccatctgcgtcatgctcattggctccctcatgtatgctagcatcttcggcaacgtgtcggccatcatccagcggctgtactcgggcacagcccgctaccacacacagatgctgcgggtgcgggagttcatccgcttccaccagatccccaatcccctgcgccagcgcctcgaggagtacttccagcacgcctggtcctacaccaacggcatcgacatgaacgcggtgctgaagggcttccctgagtgcctgcaggctgacatctgcctgcacctgaaccgctcactgctgcagcactgcaaacccttccgaggggccaccaagggctgccttcgggccctggccatgaagttcaagaccacacatgcaccgccaggggacacactggtgcatgctggggacctgctcaccgccctgtacttcatctcccggggctccatcgagatcctgcggggcgacgtcgtcgtggccatcctggggaagaatgacatctttggggagcctctgaacctgtatgcaaggcctggcaagtcgaacggggatgtgcgggccctcacctactgtgacctacacaagatccatcgggacgacctgctggaggtgctggacatgtaccctgagttctccgaccacttctggtccagcctggagatcaccttcaacctgcgagataccaacatgatcccgggctcccccggcagtacggagttagagggtggcttcagtcggcaacgcaagcgcaagttgtccttccgcaggcgcacggacaaggacacggagcagccaggggaggtgtcggccttggggccgggccgggcgggggcagggccgagtagccggggccggccgggggggccgtggggggagagcccgtccagtggcccctccagccctgagagcagtgaggatgagggcccaggccgcagctccagccccctccgcctggtgcccttctccagccccaggccccccggagagccgccgggtggggagcccctgatggaggactgcgagaagagcagcgacacttgcaaccccctgtcaggcgccttctcaggagtgtccaacattttcagcttctggggggacagtcggggccgccagtaccaggagctccctcgatgccccgcccccacccccagcctcctcaacatccccctctccagcccgggtcggcggccccggggcgacgtggagagcaggctggatgccctccagcgccagctcaacaggctggagacccggctgagtgcagacatggccactgtcctgcagctgctacagaggcagatgacgctggtcccgcccgcctacagtgctgtgaccaccccggggcctggccccacttccacatccccgctgttgcccgtcagccccctccccaccctcaccttggactcgctttctcaggtttcccagttcatggcgtgtgaggagctgcccccgggggccccagagtttccccaagaaggccccacacgacgcctctccctaccgggccagctgggggccctcacctcccagcccctgcacagacacggctcggacccgggcagttagtggggctgcccagtgtggacacgtggctcacccagggatcaaggcgctgctgggccgctccccttggaggccctgctcaggaggccctgaccgtggaaggggagaggaactcgaaagcacagctcctcccccagcccttgggaccatcttctcctgcagtcccctgggccccagtgagaggggcaggggcagggccggcagtaggtggggcctgtggtccccccactgccctgagggcattagctggtctaactgcccggaggcacccggccctgggccttaggcacctcaaggacttttctgctatttactgctcttattgttaaggataataattaaggatcatatgaataattaatgaagatgctgatgactatgaataataaataattatcctgaggaga

SEQ ID NO: 845 - DNA, 3884 bp, Homo sapiens
  source 1..3884: mol_type = genomic DNA
  misc_feature 1..3884: note = cDNA of KCNH2 gene SNP c.3392G>T (p.Gly1131Val)
atgccggtgcggaggggccacgtcgcgccgcagaacaccttcctggacaccatcatccgcaagtttgagggccagagccgtaagttcatcatcgccaacgctcgggtggagaactgcgccgtcatctactgcaacgacggcttctgcgagctgtgcggctactcgcgggccgaggtgatgcagcgaccctgcacctgcgacttcctgcacgggccgcgcacgcagcgccgcgctgccgcgcagatcgcgcaggcactgctgggcgccgaggagcgcaaagtggaaatcgccttctaccggaaagatgggagctgcttcctatgtctggtggatgtggtgcccgtgaagaacgaggatggggctgtcatcatgttcatcctcaatttcgaggtggtgatggagaaggacatggtggggtccccggctcatgacaccaaccaccggggcccccccaccagctggctggccccaggccgcgccaagaccttccgcctgaagctgcccgcgctgctggcgctgacggcccgggagtcgtcggtgcggtcgggcggcgcgggcggcgcgggcgccccgggggccgtggtggtggacgtggacctgacgcccgcggcacccagcagcgagtcgctggccctggacgaagtgacagccatggacaaccacgtggcagggctcgggcccgcggaggagcggcgtgcgctggtgggtcccggctctccgccccgcagcgcgcccggccagctcccatcgccccgggcgcacagcctcaaccccgacgcctcgggctccagctgcagcctggcccggacgcgctcccgagaaagctgcgccagcgtgcgccgcgcctcgtcggccgacgacatcgaggccatgcgcgccggggtgctgcccccgccaccgcgccacgccagcaccggggccatgcacccactgcgcagcggcttgctcaactccacctcggactccgacctcgtgcgctaccgcaccattagcaagattccccaaatcaccctcaactttgtggacctcaagggcgaccccttcttggcttcgcccaccagtgaccgtgagatcatagcacctaagataaaggagcgaacccacaatgtcactgagaaggtcacccaggtcctgtccctgggcgccgacgtgctgcctgagtacaagctgcaggcaccgcgcatccaccgctggaccatcctgcattacagccccttcaaggccgtgtgggactggctcatcctgctgctggtcatctacacggctgtcttcacaccctactcggctgccttcctgctgaaggagacggaagaaggcccgcctgctaccgagtgtggctacgcctgccagccgctggctgtggtggacctcatcgtggacatcatgttcattgtggacatcctcatcaacttccgcaccacctacgtcaatgccaacgaggaggtggtcagccaccccggccgcatcgccgtccactacttcaagggctggttcctcatcgacatggtggccgccatccccttcgacctgctcatcttcggctctggctctgaggagctgatcgggctgctgaagactgcgcggctgctgcggctggtgcgcgtggcgcggaagctggatcgctactcagagtacggcgcggccgtgctgttcttgctcatgtgcacctttgcgctcatcgcgcactggctagcctgcatctggtacgccatcggcaacatggagcagccacacatggactcacgcatcggctggctgcacaacctgggcgaccagataggcaaaccctacaacagcagcggcctgggcggcccctccatcaaggacaagtatgtgacggcgctctacttcaccttcagcagcctcaccagtgtgggcttcggcaacgtctctcccaacaccaactcagagaagatcttctccatctgcgtcatgctcattggctccctcatgtatgctagcatcttcggcaacgtgtcggccatcatccagcggctgtactcgggcacagcccgctaccacacacagatgctgcgggtgcgggagttcatccgcttccaccagatccccaatcccctgcgccagcgcctcgaggagtacttccagcacgcctggtcctacaccaacggcatcgacatgaacgcggtgctgaagggcttccctgagtgcctgcaggctgacatctgcctgcacctgaaccgctcactgctgcagcactgcaaacccttccgaggggccaccaagggctgccttcgggccctggccatgaagttcaagaccacacatgcaccgccaggggacacactggtgcatgctggggacctgctcaccgccctgtacttcatctcccggggctccatcgagatcctgcggggcgacgtcgtcgtggccatcctggggaagaatgacatctttggggagcctctgaacctgtatgcaaggcctggcaagtcgaacggggatgtgcgggccctcacctactgtgacctacacaagatccatcgggacgacctgctggaggtgctggacatgtaccctgagttctccgaccacttctggtccagcctggagatcaccttcaacctgcgagataccaacatgatcccgggctcccccggcagtacggagttagagggtggcttcagtcggcaacgcaagcgcaagttgtccttccgcaggcgcacggacaaggacacggagcagccaggggaggtgtcggccttggggccgggccgggcgggggcagggccgagtagccggggccggccgggggggccgtggggggagagcccgtccagtggcccctccagccctgagagcagtgaggatgagggcccaggccgcagctccagccccctccgcctggtgcccttctccagccccaggccccccggagagccgccgggtggggagcccctgatggaggactgcgagaagagcagcgacacttgcaaccccctgtcaggcgccttctcaggagtgtccaacattttcagcttctggggggacagtcggggccgccagtaccaggagctccctcgatgccccgcccccacccccagcctcctcaacatccccctctccagcccgggtcggcggccccggggcgacgtggagagcaggctggatgccctccagcgccagctcaacaggctggagacccggctgagtgcagacatggccactgtcctgcagctgctacagaggcagatgacgctggtcccgcccgcctacagtgctgtgaccaccccggggcctggccccacttccacatccccgctgttgcccgtcagccccctccccaccctcaccttggactcgctttctcaggtttcccagttcatggcgtgtgaggagctgcccccgggggccccagagcttccccaagaagtccccacacgacgcctctccctaccgggccagctgggggccctcacctcccagcccctgcacagacacggctcggacccgggcagttagtggggctgcccagtgtggacacgtggctcacccagggatcaaggcgctgctgggccgctccccttggaggccctgctcaggaggccctgaccgtggaaggggagaggaactcgaaagcacagctcctcccccagcccttgggaccatcttctcctgcagtcccctgggccccagtgagaggggcaggggcagggccggcagtaggtggggcctgtggtccccccactgccctgagggcattagctggtctaactgcccggaggcacccggccctgggccttaggcacctcaaggacttttctgctatttactgctcttattgttaaggataataattaaggatcatatgaataattaatgaagatgctgatgactatgaataataaataattatcctgaggaga

SEQ ID NO: 846 - DNA, 3884 bp, Homo sapiens
  source 1..3884: mol_type = genomic DNA
  misc_feature 1..3884: note = cDNA of KCNH2 gene SNP c.3394C>G (p.Pro1132Ala)
atgccggtgcggaggggccacgtcgcgccgcagaacaccttcctggacaccatcatccgcaagtttgagggccagagccgtaagttcatcatcgccaacgctcgggtggagaactgcgccgtcatctactgcaacgacggcttctgcgagctgtgcggctactcgcgggccgaggtgatgcagcgaccctgcacctgcgacttcctgcacgggccgcgcacgcagcgccgcgctgccgcgcagatcgcgcaggcactgctgggcgccgaggagcgcaaagtggaaatcgccttctaccggaaagatgggagctgcttcctatgtctggtggatgtggtgcccgtgaagaacgaggatggggctgtcatcatgttcatcctcaatttcgaggtggtgatggagaaggacatggtggggtccccggctcatgacaccaaccaccggggcccccccaccagctggctggccccaggccgcgccaagaccttccgcctgaagctgcccgcgctgctggcgctgacggcccgggagtcgtcggtgcggtcgggcggcgcgggcggcgcgggcgccccgggggccgtggtggtggacgtggacctgacgcccgcggcacccagcagcgagtcgctggccctggacgaagtgacagccatggacaaccacgtggcagggctcgggcccgcggaggagcggcgtgcgctggtgggtcccggctctccgccccgcagcgcgcccggccagctcccatcgccccgggcgcacagcctcaaccccgacgcctcgggctccagctgcagcctggcccggacgcgctcccgagaaagctgcgccagcgtgcgccgcgcctcgtcggccgacgacatcgaggccatgcgcgccggggtgctgcccccgccaccgcgccacgccagcaccggggccatgcacccactgcgcagcggcttgctcaactccacctcggactccgacctcgtgcgctaccgcaccattagcaagattccccaaatcaccctcaactttgtggacctcaagggcgaccccttcttggcttcgcccaccagtgaccgtgagatcatagcacctaagataaaggagcgaacccacaatgtcactgagaaggtcacccaggtcctgtccctgggcgccgacgtgctgcctgagtacaagctgcaggcaccgcgcatccaccgctggaccatcctgcattacagccccttcaaggccgtgtgggactggctcatcctgctgctggtcatctacacggctgtcttcacaccctactcggctgccttcctgctgaaggagacggaagaaggcccgcctgctaccgagtgtggctacgcctgccagccgctggctgtggtggacctcatcgtggacatcatgttcattgtggacatcctcatcaacttccgcaccacctacgtcaatgccaacgaggaggtggtcagccaccccggccgcatcgccgtccactacttcaagggctggttcctcatcgacatggtggccgccatccccttcgacctgctcatcttcggctctggctctgaggagctgatcgggctgctgaagactgcgcggctgctgcggctggtgcgcgtggcgcggaagctggatcgctactcagagtacggcgcggccgtgctgttcttgctcatgtgcacctttgcgctcatcgcgcactggctagcctgcatctggtacgccatcggcaacatggagcagccacacatggactcacgcatcggctggctgcacaacctgggcgaccagataggcaaaccctacaacagcagcggcctgggcggcccctccatcaaggacaagtatgtgacggcgctctacttcaccttcagcagcctcaccagtgtgggcttcggcaacgtctctcccaacaccaactcagagaagatcttctccatctgcgtcatgctcattggctccctcatgtatgctagcatcttcggcaacgtgtcggccatcatccagcggctgtactcgggcacagcccgctaccacacacagatgctgcgggtgcgggagttcatccgcttccaccagatccccaatcccctgcgccagcgcctcgaggagtacttccagcacgcctggtcctacaccaacggcatcgacatgaacgcggtgctgaagggcttccctgagtgcctgcaggctgacatctgcctgcacctgaaccgctcactgctgcagcactgcaaacccttccgaggggccaccaagggctgccttcgggccctggccatgaagttcaagaccacacatgcaccgccaggggacacactggtgcatgctggggacctgctcaccgccctgtacttcatctcccggggctccatcgagatcctgcggggcgacgtcgtcgtggccatcctggggaagaatgacatctttggggagcctctgaacctgtatgcaaggcctggcaagtcgaacggggatgtgcgggccctcacctactgtgacctacacaagatccatcgggacgacctgctggaggtgctggacatgtaccctgagttctccgaccacttctggtccagcctggagatcaccttcaacctgcgagataccaacatgatcccgggctcccccggcagtacggagttagagggtggcttcagtcggcaacgcaagcgcaagttgtccttccgcaggcgcacggacaaggacacggagcagccaggggaggtgtcggccttggggccgggccgggcgggggcagggccgagtagccggggccggccgggggggccgtggggggagagcccgtccagtggcccctccagccctgagagcagtgaggatgagggcccaggccgcagctccagccccctccgcctggtgcccttctccagccccaggccccccggagagccgccgggtggggagcccctgatggaggactgcgagaagagcagcgacacttgcaaccccctgtcaggcgccttctcaggagtgtccaacattttcagcttctggggggacagtcggggccgccagtaccaggagctccctcgatgccccgcccccacccccagcctcctcaacatccccctctccagcccgggtcggcggccccggggcgacgtggagagcaggctggatgccctccagcgccagctcaacaggctggagacccggctgagtgcagacatggccactgtcctgcagctgctacagaggcagatgacgctggtcccgcccgcctacagtgctgtgaccaccccggggcctggccccacttccacatccccgctgttgcccgtcagccccctccccaccctcaccttggactcgctttctcaggtttcccagttcatggcgtgtgaggagctgcccccgggggccccagagcttccccaagaaggcgccacacgacgcctctccctaccgggccagctgggggccctcacctcccagcccctgcacagacacggctcggacccgggcagttagtggggctgcccagtgtggacacgtggctcacccagggatcaaggcgctgctgggccgctccccttggaggccctgctcaggaggccctgaccgtggaaggggagaggaactcgaaagcacagctcctcccccagcccttgggaccatcttctcctgcagtcccctgggccccagtgagaggggcaggggcagggccggcagtaggtggggcctgtggtccccccactgccctgagggcattagctggtctaactgcccggaggcacccggccctgggccttaggcacctcaaggacttttctgctatttactgctcttattgttaaggataataattaaggatcatatgaataattaatgaagatgctgatgactatgaataataaataattatcctgaggaga

SEQ ID NO: 847 - DNA, 3884 bp, Homo sapiens
  source 1..3884: mol_type = genomic DNA
  misc_feature 1..3884: note = cDNA of KCNH2 gene SNP c.3400C>T (p.Arg1134Ter)
atgccggtgcggaggggccacgtcgcgccgcagaacaccttcctggacaccatcatccgcaagtttgagggccagagccgtaagttcatcatcgccaacgctcgggtggagaactgcgccgtcatctactgcaacgacggcttctgcgagctgtgcggctactcgcgggccgaggtgatgcagcgaccctgcacctgcgacttcctgcacgggccgcgcacgcagcgccgcgctgccgcgcagatcgcgcaggcactgctgggcgccgaggagcgcaaagtggaaatcgccttctaccggaaagatgggagctgcttcctatgtctggtggatgtggtgcccgtgaagaacgaggatggggctgtcatcatgttcatcctcaatttcgaggtggtgatggagaaggacatggtggggtccccggctcatgacaccaaccaccggggcccccccaccagctggctggccccaggccgcgccaagaccttccgcctgaagctgcccgcgctgctggcgctgacggcccgggagtcgtcggtgcggtcgggcggcgcgggcggcgcgggcgccccgggggccgtggtggtggacgtggacctgacgcccgcggcacccagcagcgagtcgctggccctggacgaagtgacagccatggacaaccacgtggcagggctcgggcccgcggaggagcggcgtgcgctggtgggtcccggctctccgccccgcagcgcgcccggccagctcccatcgccccgggcgcacagcctcaaccccgacgcctcgggctccagctgcagcctggcccggacgcgctcccgagaaagctgcgccagcgtgcgccgcgcctcgtcggccgacgacatcgaggccatgcgcgccggggtgctgcccccgccaccgcgccacgccagcaccggggccatgcacccactgcgcagcggcttgctcaactccacctcggactccgacctcgtgcgctaccgcaccattagcaagattccccaaatcaccctcaactttgtggacctcaagggcgaccccttcttggcttcgcccaccagtgaccgtgagatcatagcacctaagataaaggagcgaacccacaatgtcactgagaaggtcacccaggtcctgtccctgggcgccgacgtgctgcctgagtacaagctgcaggcaccgcgcatccaccgctggaccatcctgcattacagccccttcaaggccgtgtgggactggctcatcctgctgctggtcatctacacggctgtcttcacaccctactcggctgccttcctgctgaaggagacggaagaaggcccgcctgctaccgagtgtggctacgcctgccagccgctggctgtggtggacctcatcgtggacatcatgttcattgtggacatcctcatcaacttccgcaccacctacgtcaatgccaacgaggaggtggtcagccaccccggccgcatcgccgtccactacttcaagggctggttcctcatcgacatggtggccgccatccccttcgacctgctcatcttcggctctggctctgaggagctgatcgggctgctgaagactgcgcggctgctgcggctggtgcgcgtggcgcggaagctggatcgctactcagagtacggcgcggccgtgctgttcttgctcatgtgcacctttgcgctcatcgcgcactggctagcctgcatctggtacgccatcggcaacatggagcagccacacatggactcacgcatcggctggctgcacaacctgggcgaccagataggcaaaccctacaacagcagcggcctgggcggcccctccatcaaggacaagtatgtgacggcgctctacttcaccttcagcagcctcaccagtgtgggcttcggcaacgtctctcccaacaccaactcagagaagatcttctccatctgcgtcatgctcattggctccctcatgtatgctagcatcttcggcaacgtgtcggccatcatccagcggctgtactcgggcacagcccgctaccacacacagatgctgcgggtgcgggagttcatccgcttccaccagatccccaatcccctgcgccagcgcctcgaggagtacttccagcacgcctggtcctacaccaacggcatcgacatgaacgcggtgctgaagggcttccctgagtgcctgcaggctgacatctgcctgcacctgaaccgctcactgctgcagcactgcaaacccttccgaggggccaccaagggctgccttcgggccctggccatgaagttcaagaccacacatgcaccgccaggggacacactggtgcatgctggggacctgctcaccgccctgtacttcatctcccggggctccatcgagatcctgcggggcgacgtcgtcgtggccatcctggggaagaatgacatctttggggagcctctgaacctgtatgcaaggcctggcaagtcgaacggggatgtgcgggccctcacctactgtgacctacacaagatccatcgggacgacctgctggaggtgctggacatgtaccctgagttctccgaccacttctggtccagcctggagatcaccttcaacctgcgagataccaacatgatcccgggctcccccggcagtacggagttagagggtggcttcagtcggcaacgcaagcgcaagttgtccttccgcaggcgcacggacaaggacacggagcagccaggggaggtgtcggccttggggccgggccgggcgggggcagggccgagtagccggggccggccgggggggccgtggggggagagcccgtccagtggcccctccagccctgagagcagtgaggatgagggcccaggccgcagctccagccccctccgcctggtgcccttctccagccccaggccccccggagagccgccgggtggggagcccctgatggaggactgcgagaagagcagcgacacttgcaaccccctgtcaggcgccttctcaggagtgtccaacattttcagcttctggggggacagtcggggccgccagtaccaggagctccctcgatgccccgcccccacccccagcctcctcaacatccccctctccagcccgggtcggcggccccggggcgacgtggagagcaggctggatgccctccagcgccagctcaacaggctggagacccggctgagtgcagacatggccactgtcctgcagctgctacagaggcagatgacgctggtcccgcccgcctacagtgctgtgaccaccccggggcctggccccacttccacatccccgctgttgcccgtcagccccctccccaccctcaccttggactcgctttctcaggtttcccagttcatggcgtgtgaggagctgcccccgggggccccagagcttccccaagaaggccccacatgacgcctctccctaccgggccagctgggggccctcacctcccagcccctgcacagacacggctcggacccgggcagttagtggggctgcccagtgtggacacgtggctcacccagggatcaaggcgctgctgggccgctccccttggaggccctgctcaggaggccctgaccgtggaaggggagaggaactcgaaagcacagctcctcccccagcccttgggaccatcttctcctgcagtcccctgggccccagtgagaggggcaggggcagggccggcagtaggtggggcctgtggtccccccactgccctgagggcattagctggtctaactgcccggaggcacccggccctgggccttaggcacctcaaggacttttctgctatttactgctcttattgttaaggataataattaaggatcatatgaataattaatgaagatgctgatgactatgaataataaataattatcctgaggaga

SEQ ID NO: 848 - DNA, 3884 bp, Homo sapiens
  source 1..3884: mol_type = genomic DNA
  misc_feature 1..3884: note = cDNA of KCNH2 gene SNP c.3403C>T (p.Arg1135Cys)
atgccggtgcggaggggccacgtcgcgccgcagaacaccttcctggacaccatcatccgcaagtttgagggccagagccgtaagttcatcatcgccaacgctcgggtggagaactgcgccgtcatctactgcaacgacggcttctgcgagctgtgcggctactcgcgggccgaggtgatgcagcgaccctgcacctgcgacttcctgcacgggccgcgcacgcagcgccgcgctgccgcgcagatcgcgcaggcactgctgggcgccgaggagcgcaaagtggaaatcgccttctaccggaaagatgggagctgcttcctatgtctggtggatgtggtgcccgtgaagaacgaggatggggctgtcatcatgttcatcctcaatttcgaggtggtgatggagaaggacatggtggggtccccggctcatgacaccaaccaccggggcccccccaccagctggctggccccaggccgcgccaagaccttccgcctgaagctgcccgcgctgctggcgctgacggcccgggagtcgtcggtgcggtcgggcggcgcgggcggcgcgggcgccccgggggccgtggtggtggacgtggacctgacgcccgcggcacccagcagcgagtcgctggccctggacgaagtgacagccatggacaaccacgtggcagggctcgggcccgcggaggagcggcgtgcgctggtgggtcccggctctccgccccgcagcgcgcccggccagctcccatcgccccgggcgcacagcctcaaccccgacgcctcgggctccagctgcagcctggcccggacgcgctcccgagaaagctgcgccagcgtgcgccgcgcctcgtcggccgacgacatcgaggccatgcgcgccggggtgctgcccccgccaccgcgccacgccagcaccggggccatgcacccactgcgcagcggcttgctcaactccacctcggactccgacctcgtgcgctaccgcaccattagcaagattccccaaatcaccctcaactttgtggacctcaagggcgaccccttcttggcttcgcccaccagtgaccgtgagatcatagcacctaagataaaggagcgaacccacaatgtcactgagaaggtcacccaggtcctgtccctgggcgccgacgtgctgcctgagtacaagctgcaggcaccgcgcatccaccgctggaccatcctgcattacagccccttcaaggccgtgtgggactggctcatcctgctgctggtcatctacacggctgtcttcacaccctactcggctgccttcctgctgaaggagacggaagaaggcccgcctgctaccgagtgtggctacgcctgccagccgctggctgtggtggacctcatcgtggacatcatgttcattgtggacatcctcatcaacttccgcaccacctacgtcaatgccaacgaggaggtggtcagccaccccggccgcatcgccgtccactacttcaagggctggttcctcatcgacatggtggccgccatccccttcgacctgctcatcttcggctctggctctgaggagctgatcgggctgctgaagactgcgcggctgctgcggctggtgcgcgtggcgcggaagctggatcgctactcagagtacggcgcggccgtgctgttcttgctcatgtgcacctttgcgctcatcgcgcactggctagcctgcatctggtacgccatcggcaacatggagcagccacacatggactcacgcatcggctggctgcacaacctgggcgaccagataggcaaaccctacaacagcagcggcctgggcggcccctccatcaaggacaagtatgtgacggcgctctacttcaccttcagcagcctcaccagtgtgggcttcggcaacgtctctcccaacaccaactcagagaagatcttctccatctgcgtcatgctcattggctccctcatgtatgctagcatcttcggcaacgtgtcggccatcatccagcggctgtactcgggcacagcccgctaccacacacagatgctgcgggtgcgggagttcatccgcttccaccagatccccaatcccctgcgccagcgcctcgaggagtacttccagcacgcctggtcctacaccaacggcatcgacatgaacgcggtgctgaagggcttccctgagtgcctgcaggctgacatctgcctgcacctgaaccgctcactgctgcagcactgcaaacccttccgaggggccaccaagggctgccttcgggccctggccatgaagttcaagaccacacatgcaccgccaggggacacactggtgcatgctggggacctgctcaccgccctgtacttcatctcccggggctccatcgagatcctgcggggcgacgtcgtcgtggccatcctggggaagaatgacatctttggggagcctctgaacctgtatgcaaggcctggcaagtcgaacggggatgtgcgggccctcacctactgtgacctacacaagatccatcgggacgacctgctggaggtgctggacatgtaccctgagttctccgaccacttctggtccagcctggagatcaccttcaacctgcgagataccaacatgatcccgggctcccccggcagtacggagttagagggtggcttcagtcggcaacgcaagcgcaagttgtccttccgcaggcgcacggacaaggacacggagcagccaggggaggtgtcggccttggggccgggccgggcgggggcagggccgagtagccggggccggccgggggggccgtggggggagagcccgtccagtggcccctccagccctgagagcagtgaggatgagggcccaggccgcagctccagccccctccgcctggtgcccttctccagccccaggccccccggagagccgccgggtggggagcccctgatggaggactgcgagaagagcagcgacacttgcaaccccctgtcaggcgccttctcaggagtgtccaacattttcagcttctggggggacagtcggggccgccagtaccaggagctccctcgatgccccgcccccacccccagcctcctcaacatccccctctccagcccgggtcggcggccccggggcgacgtggagagcaggctggatgccctccagcgccagctcaacaggctggagacccggctgagtgcagacatggccactgtcctgcagctgctacagaggcagatgacgctggtcccgcccgcctacagtgctgtgaccaccccggggcctggccccacttccacatccccgctgttgcccgtcagccccctccccaccctcaccttggactcgctttctcaggtttcccagttcatggcgtgtgaggagctgcccccgggggccccagagcttccccaagaaggccccacacgatgcctctccctaccgggccagctgggggccctcacctcccagcccctgcacagacacggctcggacccgggcagttagtggggctgcccagtgtggacacgtggctcacccagggatcaaggcgctgctgggccgctccccttggaggccctgctcaggaggccctgaccgtggaaggggagaggaactcgaaagcacagctcctcccccagcccttgggaccatcttctcctgcagtcccctgggccccagtgagaggggcaggggcagggccggcagtaggtggggcctgtggtccccccactgccctgagggcattagctggtctaactgcccggaggcacccggccctgggccttaggcacctcaaggacttttctgctatttactgctcttattgttaaggataataattaaggatcatatgaataattaatgaagatgctgatgactatgaataataaataattatcctgaggaga

SEQ ID NO: 849 - DNA, 3884 bp, Homo sapiens
  source 1..3884: mol_type = genomic DNA
  misc_feature 1..3884: note = cDNA of KCNH2 gene SNP c.3404G>A (p.Arg1135His)
atgccggtgcggaggggccacgtcgcgccgcagaacaccttcctggacaccatcatccgcaagtttgagggccagagccgtaagttcatcatcgccaacgctcgggtggagaactgcgccgtcatctactgcaacgacggcttctgcgagctgtgcggctactcgcgggccgaggtgatgcagcgaccctgcacctgcgacttcctgcacgggccgcgcacgcagcgccgcgctgccgcgcagatcgcgcaggcactgctgggcgccgaggagcgcaaagtggaaatcgccttctaccggaaagatgggagctgcttcctatgtctggtggatgtggtgcccgtgaagaacgaggatggggctgtcatcatgttcatcctcaatttcgaggtggtgatggagaaggacatggtggggtccccggctcatgacaccaaccaccggggcccccccaccagctggctggccccaggccgcgccaagaccttccgcctgaagctgcccgcgctgctggcgctgacggcccgggagtcgtcggtgcggtcgggcggcgcgggcggcgcgggcgccccgggggccgtggtggtggacgtggacctgacgcccgcggcacccagcagcgagtcgctggccctggacgaagtgacagccatggacaaccacgtggcagggctcgggcccgcggaggagcggcgtgcgctggtgggtcccggctctccgccccgcagcgcgcccggccagctcccatcgccccgggcgcacagcctcaaccccgacgcctcgggctccagctgcagcctggcccggacgcgctcccgagaaagctgcgccagcgtgcgccgcgcctcgtcggccgacgacatcgaggccatgcgcgccggggtgctgcccccgccaccgcgccacgccagcaccggggccatgcacccactgcgcagcggcttgctcaactccacctcggactccgacctcgtgcgctaccgcaccattagcaagattccccaaatcaccctcaactttgtggacctcaagggcgaccccttcttggcttcgcccaccagtgaccgtgagatcatagcacctaagataaaggagcgaacccacaatgtcactgagaaggtcacccaggtcctgtccctgggcgccgacgtgctgcctgagtacaagctgcaggcaccgcgcatccaccgctggaccatcctgcattacagccccttcaaggccgtgtgggactggctcatcctgctgctggtcatctacacggctgtcttcacaccctactcggctgccttcctgctgaaggagacggaagaaggcccgcctgctaccgagtgtggctacgcctgccagccgctggctgtggtggacctcatcgtggacatcatgttcattgtggacatcctcatcaacttccgcaccacctacgtcaatgccaacgaggaggtggtcagccaccccggccgcatcgccgtccactacttcaagggctggttcctcatcgacatggtggccgccatccccttcgacctgctcatcttcggctctggctctgaggagctgatcgggctgctgaagactgcgcggctgctgcggctggtgcgcgtggcgcggaagctggatcgctactcagagtacggcgcggccgtgctgttcttgctcatgtgcacctttgcgctcatcgcgcactggctagcctgcatctggtacgccatcggcaacatggagcagccacacatggactcacgcatcggctggctgcacaacctgggcgaccagataggcaaaccctacaacagcagcggcctgggcggcccctccatcaaggacaagtatgtgacggcgctctacttcaccttcagcagcctcaccagtgtgggcttcggcaacgtctctcccaacaccaactcagagaagatcttctccatctgcgtcatgctcattggctccctcatgtatgctagcatcttcggcaacgtgtcggccatcatccagcggctgtactcgggcacagcccgctaccacacacagatgctgcgggtgcgggagttcatccgcttccaccagatccccaatcccctgcgccagcgcctcgaggagtacttccagcacgcctggtcctacaccaacggcatcgacatgaacgcggtgctgaagggcttccctgagtgcctgcaggctgacatctgcctgcacctgaaccgctcactgctgcagcactgcaaacccttccgaggggccaccaagggctgccttcgggccctggccatgaagttcaagaccacacatgcaccgccaggggacacactggtgcatgctggggacctgctcaccgccctgtacttcatctcccggggctccatcgagatcctgcggggcgacgtcgtcgtggccatcctggggaagaatgacatctttggggagcctctgaacctgtatgcaaggcctggcaagtcgaacggggatgtgcgggccctcacctactgtgacctacacaagatccatcgggacgacctgctggaggtgctggacatgtaccctgagttctccgaccacttctggtccagcctggagatcaccttcaacctgcgagataccaacatgatcccgggctcccccggcagtacggagttagagggtggcttcagtcggcaacgcaagcgcaagttgtccttccgcaggcgcacggacaaggacacggagcagccaggggaggtgtcggccttggggccgggccgggcgggggcagggccgagtagccggggccggccgggggggccgtggggggagagcccgtccagtggcccctccagccctgagagcagtgaggatgagggcccaggccgcagctccagccccctccgcctggtgcccttctccagccccaggccccccggagagccgccgggtggggagcccctgatggaggactgcgagaagagcagcgacacttgcaaccccctgtcaggcgccttctcaggagtgtccaacattttcagcttctggggggacagtcggggccgccagtaccaggagctccctcgatgccccgcccccacccccagcctcctcaacatccccctctccagcccgggtcggcggccccggggcgacgtggagagcaggctggatgccctccagcgccagctcaacaggctggagacccggctgagtgcagacatggccactgtcctgcagctgctacagaggcagatgacgctggtcccgcccgcctacagtgctgtgaccaccccggggcctggccccacttccacatccccgctgttgcccgtcagccccctccccaccctcaccttggactcgctttctcaggtttcccagttcatggcgtgtgaggagctgcccccgggggccccagagcttccccaagaaggccccacacgacacctctccctaccgggccagctgggggccctcacctcccagcccctgcacagacacggctcggacccgggcagttagtggggctgcccagtgtggacacgtggctcacccagggatcaaggcgctgctgggccgctccccttggaggccctgctcaggaggccctgaccgtggaaggggagaggaactcgaaagcacagctcctcccccagcccttgggaccatcttctcctgcagtcccctgggccccagtgagaggggcaggggcagggccggcagtaggtggggcctgtggtccccccactgccctgagggcattagctggtctaactgcccggaggcacccggccctgggccttaggcacctcaaggacttttctgctatttactgctcttattgttaaggataataattaaggatcatatgaataattaatgaagatgctgatgactatgaataataaataattatcctgaggaga

SEQ ID NO: 850 - DNA, 3884 bp, Homo sapiens
  source 1..3884: mol_type = genomic DNA
  misc_feature 1..3884: note = cDNA of KCNH2 gene SNP c.3406C>T (p.Leu1136Phe)
atgccggtgcggaggggccacgtcgcgccgcagaacaccttcctggacaccatcatccgcaagtttgagggccagagccgtaagttcatcatcgccaacgctcgggtggagaactgcgccgtcatctactgcaacgacggcttctgcgagctgtgcggctactcgcgggccgaggtgatgcagcgaccctgcacctgcgacttcctgcacgggccgcgcacgcagcgccgcgctgccgcgcagatcgcgcaggcactgctgggcgccgaggagcgcaaagtggaaatcgccttctaccggaaagatgggagctgcttcctatgtctggtggatgtggtgcccgtgaagaacgaggatggggctgtcatcatgttcatcctcaatttcgaggtggtgatggagaaggacatggtggggtccccggctcatgacaccaaccaccggggcccccccaccagctggctggccccaggccgcgccaagaccttccgcctgaagctgcccgcgctgctggcgctgacggcccgggagtcgtcggtgcggtcgggcggcgcgggcggcgcgggcgccccgggggccgtggtggtggacgtggacctgacgcccgcggcacccagcagcgagtcgctggccctggacgaagtgacagccatggacaaccacgtggcagggctcgggcccgcggaggagcggcgtgcgctggtgggtcccggctctccgccccgcagcgcgcccggccagctcccatcgccccgggcgcacagcctcaaccccgacgcctcgggctccagctgcagcctggcccggacgcgctcccgagaaagctgcgccagcgtgcgccgcgcctcgtcggccgacgacatcgaggccatgcgcgccggggtgctgcccccgccaccgcgccacgccagcaccggggccatgcacccactgcgcagcggcttgctcaactccacctcggactccgacctcgtgcgctaccgcaccattagcaagattccccaaatcaccctcaactttgtggacctcaagggcgaccccttcttggcttcgcccaccagtgaccgtgagatcatagcacctaagataaaggagcgaacccacaatgtcactgagaaggtcacccaggtcctgtccctgggcgccgacgtgctgcctgagtacaagctgcaggcaccgcgcatccaccgctggaccatcctgcattacagccccttcaaggccgtgtgggactggctcatcctgctgctggtcatctacacggctgtcttcacaccctactcggctgccttcctgctgaaggagacggaagaaggcccgcctgctaccgagtgtggctacgcctgccagccgctggctgtggtggacctcatcgtggacatcatgttcattgtggacatcctcatcaacttccgcaccacctacgtcaatgccaacgaggaggtggtcagccaccccggccgcatcgccgtccactacttcaagggctggttcctcatcgacatggtggccgccatccccttcgacctgctcatcttcggctctggctctgaggagctgatcgggctgctgaagactgcgcggctgctgcggctggtgcgcgtggcgcggaagctggatcgctactcagagtacggcgcggccgtgctgttcttgctcatgtgcacctttgcgctcatcgcgcactggctagcctgcatctggtacgccatcggcaacatggagcagccacacatggactcacgcatcggctggctgcacaacctgggcgaccagataggcaaaccctacaacagcagcggcctgggcggcccctccatcaaggacaagtatgtgacggcgctctacttcaccttcagcagcctcaccagtgtgggcttcggcaacgtctctcccaacaccaactcagagaagatcttctccatctgcgtcatgctcattggctccctcatgtatgctagcatcttcggcaacgtgtcggccatcatccagcggctgtactcgggcacagcccgctaccacacacagatgctgcgggtgcgggagttcatccgcttccaccagatccccaatcccctgcgccagcgcctcgaggagtacttccagcacgcctggtcctacaccaacggcatcgacatgaacgcggtgctgaagggcttccctgagtgcctgcaggctgacatctgcctgcacctgaaccgctcactgctgcagcactgcaaacccttccgaggggccaccaagggctgccttcgggccctggccatgaagttcaagaccacacatgcaccgccaggggacacactggtgcatgctggggacctgctcaccgccctgtacttcatctcccggggctccatcgagatcctgcggggcgacgtcgtcgtggccatcctggggaagaatgacatctttggggagcctctgaacctgtatgcaaggcctggcaagtcgaacggggatgtgcgggccctcacctactgtgacctacacaagatccatcgggacgacctgctggaggtgctggacatgtaccctgagttctccgaccacttctggtccagcctggagatcaccttcaacctgcgagataccaacatgatcccgggctcccccggcagtacggagttagagggtggcttcagtcggcaacgcaagcgcaagttgtccttccgcaggcgcacggacaaggacacggagcagccaggggaggtgtcggccttggggccgggccgggcgggggcagggccgagtagccggggccggccgggggggccgtggggggagagcccgtccagtggcccctccagccctgagagcagtgaggatgagggcccaggccgcagctccagccccctccgcctggtgcccttctccagccccaggccccccggagagccgccgggtggggagcccctgatggaggactgcgagaagagcagcgacacttgcaaccccctgtcaggcgccttctcaggagtgtccaacattttcagcttctggggggacagtcggggccgccagtaccaggagctccctcgatgccccgcccccacccccagcctcctcaacatccccctctccagcccgggtcggcggccccggggcgacgtggagagcaggctggatgccctccagcgccagctcaacaggctggagacccggctgagtgcagacatggccactgtcctgcagctgctacagaggcagatgacgctggtcccgcccgcctacagtgctgtgaccaccccggggcctggccccacttccacatccccgctgttgcccgtcagccccctccccaccctcaccttggactcgctttctcaggtttcccagttcatggcgtgtgaggagctgcccccgggggccccagagcttccccaagaaggccccacacgacgcttctccctaccgggccagctgggggccctcacctcccagcccctgcacagacacggctcggacccgggcagttagtggggctgcccagtgtggacacgtggctcacccagggatcaaggcgctgctgggccgctccccttggaggccctgctcaggaggccctgaccgtggaaggggagaggaactcgaaagcacagctcctcccccagcccttgggaccatcttctcctgcagtcccctgggccccagtgagaggggcaggggcagggccggcagtaggtggggcctgtggtccccccactgccctgagggcattagctggtctaactgcccggaggcacccggccctgggccttaggcacctcaaggacttttctgctatttactgctcttattgttaaggataataattaaggatcatatgaataattaatgaagatgctgatgactatgaataataaataattatcctgaggaga

SEQ ID NO: 851 - DNA, 3884 bp, Homo sapiens
  source 1..3884: mol_type = genomic DNA
  misc_feature 1..3884: note = cDNA of KCNH2 gene SNP c.340C>T (p.Pro114Ser)
atgccggtgcggaggggccacgtcgcgccgcagaacaccttcctggacaccatcatccgcaagtttgagggccagagccgtaagttcatcatcgccaacgctcgggtggagaactgcgccgtcatctactgcaacgacggcttctgcgagctgtgcggctactcgcgggccgaggtgatgcagcgaccctgcacctgcgacttcctgcacgggccgcgcacgcagcgccgcgctgccgcgcagatcgcgcaggcactgctgggcgccgaggagcgcaaagtggaaatcgccttctaccggaaagatgggagctgcttcctatgtctggtggatgtggtgtccgtgaagaacgaggatggggctgtcatcatgttcatcctcaatttcgaggtggtgatggagaaggacatggtggggtccccggctcatgacaccaaccaccggggcccccccaccagctggctggccccaggccgcgccaagaccttccgcctgaagctgcccgcgctgctggcgctgacggcccgggagtcgtcggtgcggtcgggcggcgcgggcggcgcgggcgccccgggggccgtggtggtggacgtggacctgacgcccgcggcacccagcagcgagtcgctggccctggacgaagtgacagccatggacaaccacgtggcagggctcgggcccgcggaggagcggcgtgcgctggtgggtcccggctctccgccccgcagcgcgcccggccagctcccatcgccccgggcgcacagcctcaaccccgacgcctcgggctccagctgcagcctggcccggacgcgctcccgagaaagctgcgccagcgtgcgccgcgcctcgtcggccgacgacatcgaggccatgcgcgccggggtgctgcccccgccaccgcgccacgccagcaccggggccatgcacccactgcgcagcggcttgctcaactccacctcggactccgacctcgtgcgctaccgcaccattagcaagattccccaaatcaccctcaactttgtggacctcaagggcgaccccttcttggcttcgcccaccagtgaccgtgagatcatagcacctaagataaaggagcgaacccacaatgtcactgagaaggtcacccaggtcctgtccctgggcgccgacgtgctgcctgagtacaagctgcaggcaccgcgcatccaccgctggaccatcctgcattacagccccttcaaggccgtgtgggactggctcatcctgctgctggtcatctacacggctgtcttcacaccctactcggctgccttcctgctgaaggagacggaagaaggcccgcctgctaccgagtgtggctacgcctgccagccgctggctgtggtggacctcatcgtggacatcatgttcattgtggacatcctcatcaacttccgcaccacctacgtcaatgccaacgaggaggtggtcagccaccccggccgcatcgccgtccactacttcaagggctggttcctcatcgacatggtggccgccatccccttcgacctgctcatcttcggctctggctctgaggagctgatcgggctgctgaagactgcgcggctgctgcggctggtgcgcgtggcgcggaagctggatcgctactcagagtacggcgcggccgtgctgttcttgctcatgtgcacctttgcgctcatcgcgcactggctagcctgcatctggtacgccatcggcaacatggagcagccacacatggactcacgcatcggctggctgcacaacctgggcgaccagataggcaaaccctacaacagcagcggcctgggcggcccctccatcaaggacaagtatgtgacggcgctctacttcaccttcagcagcctcaccagtgtgggcttcggcaacgtctctcccaacaccaactcagagaagatcttctccatctgcgtcatgctcattggctccctcatgtatgctagcatcttcggcaacgtgtcggccatcatccagcggctgtactcgggcacagcccgctaccacacacagatgctgcgggtgcgggagttcatccgcttccaccagatccccaatcccctgcgccagcgcctcgaggagtacttccagcacgcctggtcctacaccaacggcatcgacatgaacgcggtgctgaagggcttccctgagtgcctgcaggctgacatctgcctgcacctgaaccgctcactgctgcagcactgcaaacccttccgaggggccaccaagggctgccttcgggccctggccatgaagttcaagaccacacatgcaccgccaggggacacactggtgcatgctggggacctgctcaccgccctgtacttcatctcccggggctccatcgagatcctgcggggcgacgtcgtcgtggccatcctggggaagaatgacatctttggggagcctctgaacctgtatgcaaggcctggcaagtcgaacggggatgtgcgggccctcacctactgtgacctacacaagatccatcgggacgacctgctggaggtgctggacatgtaccctgagttctccgaccacttctggtccagcctggagatcaccttcaacctgcgagataccaacatgatcccgggctcccccggcagtacggagttagagggtggcttcagtcggcaacgcaagcgcaagttgtccttccgcaggcgcacggacaaggacacggagcagccaggggaggtgtcggccttggggccgggccgggcgggggcagggccgagtagccggggccggccgggggggccgtggggggagagcccgtccagtggcccctccagccctgagagcagtgaggatgagggcccaggccgcagctccagccccctccgcctggtgcccttctccagccccaggccccccggagagccgccgggtggggagcccctgatggaggactgcgagaagagcagcgacacttgcaaccccctgtcaggcgccttctcaggagtgtccaacattttcagcttctggggggacagtcggggccgccagtaccaggagctccctcgatgccccgcccccacccccagcctcctcaacatccccctctccagcccgggtcggcggccccggggcgacgtggagagcaggctggatgccctccagcgccagctcaacaggctggagacccggctgagtgcagacatggccactgtcctgcagctgctacagaggcagatgacgctggtcccgcccgcctacagtgctgtgaccaccccggggcctggccccacttccacatccccgctgttgcccgtcagccccctccccaccctcaccttggactcgctttctcaggtttcccagttcatggcgtgtgaggagctgcccccgggggccccagagcttccccaagaaggccccacacgacgcctctccctaccgggccagctgggggccctcacctcccagcccctgcacagacacggctcggacccgggcagttagtggggctgcccagtgtggacacgtggctcacccagggatcaaggcgctgctgggccgctccccttggaggccctgctcaggaggccctgaccgtggaaggggagaggaactcgaaagcacagctcctcccccagcccttgggaccatcttctcctgcagtcccctgggccccagtgagaggggcaggggcagggccggcagtaggtggggcctgtggtccccccactgccctgagggcattagctggtctaactgcccggaggcacccggccctgggccttaggcacctcaaggacttttctgctatttactgctcttattgttaaggataataattaaggatcatatgaataattaatgaagatgctgatgactatgaataataaataattatcctgaggaga

SEQ ID NO: 852 - DNA, 3884 bp, Homo sapiens
  source 1..3884: mol_type = genomic DNA
  misc_feature 1..3884: note = cDNA of KCNH2 gene SNP c.3410C>A (p.Ser1137Tyr)
atgccggtgcggaggggccacgtcgcgccgcagaacaccttcctggacaccatcatccgcaagtttgagggccagagccgtaagttcatcatcgccaacgctcgggtggagaactgcgccgtcatctactgcaacgacggcttctgcgagctgtgcggctactcgcgggccgaggtgatgcagcgaccctgcacctgcgacttcctgcacgggccgcgcacgcagcgccgcgctgccgcgcagatcgcgcaggcactgctgggcgccgaggagcgcaaagtggaaatcgccttctaccggaaagatgggagctgcttcctatgtctggtggatgtggtgcccgtgaagaacgaggatggggctgtcatcatgttcatcctcaatttcgaggtggtgatggagaaggacatggtggggtccccggctcatgacaccaaccaccggggcccccccaccagctggctggccccaggccgcgccaagaccttccgcctgaagctgcccgcgctgctggcgctgacggcccgggagtcgtcggtgcggtcgggcggcgcgggcggcgcgggcgccccgggggccgtggtggtggacgtggacctgacgcccgcggcacccagcagcgagtcgctggccctggacgaagtgacagccatggacaaccacgtggcagggctcgggcccgcggaggagcggcgtgcgctggtgggtcccggctctccgccccgcagcgcgcccggccagctcccatcgccccgggcgcacagcctcaaccccgacgcctcgggctccagctgcagcctggcccggacgcgctcccgagaaagctgcgccagcgtgcgccgcgcctcgtcggccgacgacatcgaggccatgcgcgccggggtgctgcccccgccaccgcgccacgccagcaccggggccatgcacccactgcgcagcggcttgctcaactccacctcggactccgacctcgtgcgctaccgcaccattagcaagattccccaaatcaccctcaactttgtggacctcaagggcgaccccttcttggcttcgcccaccagtgaccgtgagatcatagcacctaagataaaggagcgaacccacaatgtcactgagaaggtcacccaggtcctgtccctgggcgccgacgtgctgcctgagtacaagctgcaggcaccgcgcatccaccgctggaccatcctgcattacagccccttcaaggccgtgtgggactggctcatcctgctgctggtcatctacacggctgtcttcacaccctactcggctgccttcctgctgaaggagacggaagaaggcccgcctgctaccgagtgtggctacgcctgccagccgctggctgtggtggacctcatcgtggacatcatgttcattgtggacatcctcatcaacttccgcaccacctacgtcaatgccaacgaggaggtggtcagccaccccggccgcatcgccgtccactacttcaagggctggttcctcatcgacatggtggccgccatccccttcgacctgctcatcttcggctctggctctgaggagctgatcgggctgctgaagactgcgcggctgctgcggctggtgcgcgtggcgcggaagctggatcgctactcagagtacggcgcggccgtgctgttcttgctcatgtgcacctttgcgctcatcgcgcactggctagcctgcatctggtacgccatcggcaacatggagcagccacacatggactcacgcatcggctggctgcacaacctgggcgaccagataggcaaaccctacaacagcagcggcctgggcggcccctccatcaaggacaagtatgtgacggcgctctacttcaccttcagcagcctcaccagtgtgggcttcggcaacgtctctcccaacaccaactcagagaagatcttctccatctgcgtcatgctcattggctccctcatgtatgctagcatcttcggcaacgtgtcggccatcatccagcggctgtactcgggcacagcccgctaccacacacagatgctgcgggtgcgggagttcatccgcttccaccagatccccaatcccctgcgccagcgcctcgaggagtacttccagcacgcctggtcctacaccaacggcatcgacatgaacgcggtgctgaagggcttccctgagtgcctgcaggctgacatctgcctgcacctgaaccgctcactgctgcagcactgcaaacccttccgaggggccaccaagggctgccttcgggccctggccatgaagttcaagaccacacatgcaccgccaggggacacactggtgcatgctggggacctgctcaccgccctgtacttcatctcccggggctccatcgagatcctgcggggcgacgtcgtcgtggccatcctggggaagaatgacatctttggggagcctctgaacctgtatgcaaggcctggcaagtcgaacggggatgtgcgggccctcacctactgtgacctacacaagatccatcgggacgacctgctggaggtgctggacatgtaccctgagttctccgaccacttctggtccagcctggagatcaccttcaacctgcgagataccaacatgatcccgggctcccccggcagtacggagttagagggtggcttcagtcggcaacgcaagcgcaagttgtccttccgcaggcgcacggacaaggacacggagcagccaggggaggtgtcggccttggggccgggccgggcgggggcagggccgagtagccggggccggccgggggggccgtggggggagagcccgtccagtggcccctccagccctgagagcagtgaggatgagggcccaggccgcagctccagccccctccgcctggtgcccttctccagccccaggccccccggagagccgccgggtggggagcccctgatggaggactgcgagaagagcagcgacacttgcaaccccctgtcaggcgccttctcaggagtgtccaacattttcagcttctggggggacagtcggggccgccagtaccaggagctccctcgatgccccgcccccacccccagcctcctcaacatccccctctccagcccgggtcggcggccccggggcgacgtggagagcaggctggatgccctccagcgccagctcaacaggctggagacccggctgagtgcagacatggccactgtcctgcagctgctacagaggcagatgacgctggtcccgcccgcctacagtgctgtgaccaccccggggcctggccccacttccacatccccgctgttgcccgtcagccccctccccaccctcaccttggactcgctttctcaggtttcccagttcatggcgtgtgaggagctgcccccgggggccccagagcttccccaagaaggccccacacgacgcctctacctaccgggccagctgggggccctcacctcccagcccctgcacagacacggctcggacccgggcagttagtggggctgcccagtgtggacacgtggctcacccagggatcaaggcgctgctgggccgctccccttggaggccctgctcaggaggccctgaccgtggaaggggagaggaactcgaaagcacagctcctcccccagcccttgggaccatcttctcctgcagtcccctgggccccagtgagaggggcaggggcagggccggcagtaggtggggcctgtggtccccccactgccctgagggcattagctggtctaactgcccggaggcacccggccctgggccttaggcacctcaaggacttttctgctatttactgctcttattgttaaggataataattaaggatcatatgaataattaatgaagatgctgatgactatgaataataaataattatcctgaggaga

SEQ ID NO: 853 - DNA, 3884 bp, Homo sapiens
  source 1..3884: mol_type = genomic DNA
  misc_feature 1..3884: note = cDNA of KCNH2 gene SNP c.3416C>T (p.Pro1139Leu)
atgccggtgcggaggggccacgtcgcgccgcagaacaccttcctggacaccatcatccgcaagtttgagggccagagccgtaagttcatcatcgccaacgctcgggtggagaactgcgccgtcatctactgcaacgacggcttctgcgagctgtgcggctactcgcgggccgaggtgatgcagcgaccctgcacctgcgacttcctgcacgggccgcgcacgcagcgccgcgctgccgcgcagatcgcgcaggcactgctgggcgccgaggagcgcaaagtggaaatcgccttctaccggaaagatgggagctgcttcctatgtctggtggatgtggtgcccgtgaagaacgaggatggggctgtcatcatgttcatcctcaatttcgaggtggtgatggagaaggacatggtggggtccccggctcatgacaccaaccaccggggcccccccaccagctggctggccccaggccgcgccaagaccttccgcctgaagctgcccgcgctgctggcgctgacggcccgggagtcgtcggtgcggtcgggcggcgcgggcggcgcgggcgccccgggggccgtggtggtggacgtggacctgacgcccgcggcacccagcagcgagtcgctggccctggacgaagtgacagccatggacaaccacgtggcagggctcgggcccgcggaggagcggcgtgcgctggtgggtcccggctctccgccccgcagcgcgcccggccagctcccatcgccccgggcgcacagcctcaaccccgacgcctcgggctccagctgcagcctggcccggacgcgctcccgagaaagctgcgccagcgtgcgccgcgcctcgtcggccgacgacatcgaggccatgcgcgccggggtgctgcccccgccaccgcgccacgccagcaccggggccatgcacccactgcgcagcggcttgctcaactccacctcggactccgacctcgtgcgctaccgcaccattagcaagattccccaaatcaccctcaactttgtggacctcaagggcgaccccttcttggcttcgcccaccagtgaccgtgagatcatagcacctaagataaaggagcgaacccacaatgtcactgagaaggtcacccaggtcctgtccctgggcgccgacgtgctgcctgagtacaagctgcaggcaccgcgcatccaccgctggaccatcctgcattacagccccttcaaggccgtgtgggactggctcatcctgctgctggtcatctacacggctgtcttcacaccctactcggctgccttcctgctgaaggagacggaagaaggcccgcctgctaccgagtgtggctacgcctgccagccgctggctgtggtggacctcatcgtggacatcatgttcattgtggacatcctcatcaacttccgcaccacctacgtcaatgccaacgaggaggtggtcagccaccccggccgcatcgccgtccactacttcaagggctggttcctcatcgacatggtggccgccatccccttcgacctgctcatcttcggctctggctctgaggagctgatcgggctgctgaagactgcgcggctgctgcggctggtgcgcgtggcgcggaagctggatcgctactcagagtacggcgcggccgtgctgttcttgctcatgtgcacctttgcgctcatcgcgcactggctagcctgcatctggtacgccatcggcaacatggagcagccacacatggactcacgcatcggctggctgcacaacctgggcgaccagataggcaaaccctacaacagcagcggcctgggcggcccctccatcaaggacaagtatgtgacggcgctctacttcaccttcagcagcctcaccagtgtgggcttcggcaacgtctctcccaacaccaactcagagaagatcttctccatctgcgtcatgctcattggctccctcatgtatgctagcatcttcggcaacgtgtcggccatcatccagcggctgtactcgggcacagcccgctaccacacacagatgctgcgggtgcgggagttcatccgcttccaccagatccccaatcccctgcgccagcgcctcgaggagtacttccagcacgcctggtcctacaccaacggcatcgacatgaacgcggtgctgaagggcttccctgagtgcctgcaggctgacatctgcctgcacctgaaccgctcactgctgcagcactgcaaacccttccgaggggccaccaagggctgccttcgggccctggccatgaagttcaagaccacacatgcaccgccaggggacacactggtgcatgctggggacctgctcaccgccctgtacttcatctcccggggctccatcgagatcctgcggggcgacgtcgtcgtggccatcctggggaagaatgacatctttggggagcctctgaacctgtatgcaaggcctggcaagtcgaacggggatgtgcgggccctcacctactgtgacctacacaagatccatcgggacgacctgctggaggtgctggacatgtaccctgagttctccgaccacttctggtccagcctggagatcaccttcaacctgcgagataccaacatgatcccgggctcccccggcagtacggagttagagggtggcttcagtcggcaacgcaagcgcaagttgtccttccgcaggcgcacggacaaggacacggagcagccaggggaggtgtcggccttggggccgggccgggcgggggcagggccgagtagccggggccggccgggggggccgtggggggagagcccgtccagtggcccctccagccctgagagcagtgaggatgagggcccaggccgcagctccagccccctccgcctggtgcccttctccagccccaggccccccggagagccgccgggtggggagcccctgatggaggactgcgagaagagcagcgacacttgcaaccccctgtcaggcgccttctcaggagtgtccaacattttcagcttctggggggacagtcggggccgccagtaccaggagctccctcgatgccccgcccccacccccagcctcctcaacatccccctctccagcccgggtcggcggccccggggcgacgtggagagcaggctggatgccctccagcgccagctcaacaggctggagacccggctgagtgcagacatggccactgtcctgcagctgctacagaggcagatgacgctggtcccgcccgcctacagtgctgtgaccaccccggggcctggccccacttccacatccccgctgttgcccgtcagccccctccccaccctcaccttggactcgctttctcaggtttcccagttcatggcgtgtgaggagctgcccccgggggccccagagcttccccaagaaggccccacacgacgcctctccctactgggccagctgggggccctcacctcccagcccctgcacagacacggctcggacccgggcagttagtggggctgcccagtgtggacacgtggctcacccagggatcaaggcgctgctgggccgctccccttggaggccctgctcaggaggccctgaccgtggaaggggagaggaactcgaaagcacagctcctcccccagcccttgggaccatcttctcctgcagtcccctgggccccagtgagaggggcaggggcagggccggcagtaggtggggcctgtggtccccccactgccctgagggcattagctggtctaactgcccggaggcacccggccctgggccttaggcacctcaaggacttttctgctatttactgctcttattgttaaggataataattaaggatcatatgaataattaatgaagatgctgatgactatgaataataaataattatcctgaggaga

SEQ ID NO: 854 - DNA, 3884 bp, Homo sapiens
  source 1..3884: mol_type = genomic DNA
  misc_feature 1..3884: note = cDNA of KCNH2 gene SNP c.3430G>A (p.Ala1144Thr)
atgccggtgcggaggggccacgtcgcgccgcagaacaccttcctggacaccatcatccgcaagtttgagggccagagccgtaagttcatcatcgccaacgctcgggtggagaactgcgccgtcatctactgcaacgacggcttctgcgagctgtgcggctactcgcgggccgaggtgatgcagcgaccctgcacctgcgacttcctgcacgggccgcgcacgcagcgccgcgctgccgcgcagatcgcgcaggcactgctgggcgccgaggagcgcaaagtggaaatcgccttctaccggaaagatgggagctgcttcctatgtctggtggatgtggtgcccgtgaagaacgaggatggggctgtcatcatgttcatcctcaatttcgaggtggtgatggagaaggacatggtggggtccccggctcatgacaccaaccaccggggcccccccaccagctggctggccccaggccgcgccaagaccttccgcctgaagctgcccgcgctgctggcgctgacggcccgggagtcgtcggtgcggtcgggcggcgcgggcggcgcgggcgccccgggggccgtggtggtggacgtggacctgacgcccgcggcacccagcagcgagtcgctggccctggacgaagtgacagccatggacaaccacgtggcagggctcgggcccgcggaggagcggcgtgcgctggtgggtcccggctctccgccccgcagcgcgcccggccagctcccatcgccccgggcgcacagcctcaaccccgacgcctcgggctccagctgcagcctggcccggacgcgctcccgagaaagctgcgccagcgtgcgccgcgcctcgtcggccgacgacatcgaggccatgcgcgccggggtgctgcccccgccaccgcgccacgccagcaccggggccatgcacccactgcgcagcggcttgctcaactccacctcggactccgacctcgtgcgctaccgcaccattagcaagattccccaaatcaccctcaactttgtggacctcaagggcgaccccttcttggcttcgcccaccagtgaccgtgagatcatagcacctaagataaaggagcgaacccacaatgtcactgagaaggtcacccaggtcctgtccctgggcgccgacgtgctgcctgagtacaagctgcaggcaccgcgcatccaccgctggaccatcctgcattacagccccttcaaggccgtgtgggactggctcatcctgctgctggtcatctacacggctgtcttcacaccctactcggctgccttcctgctgaaggagacggaagaaggcccgcctgctaccgagtgtggctacgcctgccagccgctggctgtggtggacctcatcgtggacatcatgttcattgtggacatcctcatcaacttccgcaccacctacgtcaatgccaacgaggaggtggtcagccaccccggccgcatcgccgtccactacttcaagggctggttcctcatcgacatggtggccgccatccccttcgacctgctcatcttcggctctggctctgaggagctgatcgggctgctgaagactgcgcggctgctgcggctggtgcgcgtggcgcggaagctggatcgctactcagagtacggcgcggccgtgctgttcttgctcatgtgcacctttgcgctcatcgcgcactggctagcctgcatctggtacgccatcggcaacatggagcagccacacatggactcacgcatcggctggctgcacaacctgggcgaccagataggcaaaccctacaacagcagcggcctgggcggcccctccatcaaggacaagtatgtgacggcgctctacttcaccttcagcagcctcaccagtgtgggcttcggcaacgtctctcccaacaccaactcagagaagatcttctccatctgcgtcatgctcattggctccctcatgtatgctagcatcttcggcaacgtgtcggccatcatccagcggctgtactcgggcacagcccgctaccacacacagatgctgcgggtgcgggagttcatccgcttccaccagatccccaatcccctgcgccagcgcctcgaggagtacttccagcacgcctggtcctacaccaacggcatcgacatgaacgcggtgctgaagggcttccctgagtgcctgcaggctgacatctgcctgcacctgaaccgctcactgctgcagcactgcaaacccttccgaggggccaccaagggctgccttcgggccctggccatgaagttcaagaccacacatgcaccgccaggggacacactggtgcatgctggggacctgctcaccgccctgtacttcatctcccggggctccatcgagatcctgcggggcgacgtcgtcgtggccatcctggggaagaatgacatctttggggagcctctgaacctgtatgcaaggcctggcaagtcgaacggggatgtgcgggccctcacctactgtgacctacacaagatccatcgggacgacctgctggaggtgctggacatgtaccctgagttctccgaccacttctggtccagcctggagatcaccttcaacctgcgagataccaacatgatcccgggctcccccggcagtacggagttagagggtggcttcagtcggcaacgcaagcgcaagttgtccttccgcaggcgcacggacaaggacacggagcagccaggggaggtgtcggccttggggccgggccgggcgggggcagggccgagtagccggggccggccgggggggccgtggggggagagcccgtccagtggcccctccagccctgagagcagtgaggatgagggcccaggccgcagctccagccccctccgcctggtgcccttctccagccccaggccccccggagagccgccgggtggggagcccctgatggaggactgcgagaagagcagcgacacttgcaaccccctgtcaggcgccttctcaggagtgtccaacattttcagcttctggggggacagtcggggccgccagtaccaggagctccctcgatgccccgcccccacccccagcctcctcaacatccccctctccagcccgggtcggcggccccggggcgacgtggagagcaggctggatgccctccagcgccagctcaacaggctggagacccggctgagtgcagacatggccactgtcctgcagctgctacagaggcagatgacgctggtcccgcccgcctacagtgctgtgaccaccccggggcctggccccacttccacatccccgctgttgcccgtcagccccctccccaccctcaccttggactcgctttctcaggtttcccagttcatggcgtgtgaggagctgcccccgggggccccagagcttccccaagaaggccccacacgacgcctctccctaccgggccagctggggaccctcacctcccagcccctgcacagacacggctcggacccgggcagttagtggggctgcccagtgtggacacgtggctcacccagggatcaaggcgctgctgggccgctccccttggaggccctgctcaggaggccctgaccgtggaaggggagaggaactcgaaagcacagctcctcccccagcccttgggaccatcttctcctgcagtcccctgggccccagtgagaggggcaggggcagggccggcagtaggtggggcctgtggtccccccactgccctgagggcattagctggtctaactgcccggaggcacccggccctgggccttaggcacctcaaggacttttctgctatttactgctcttattgttaaggataataattaaggatcatatgaataattaatgaagatgctgatgactatgaataataaataattatcctgaggaga

SEQ ID NO: 855 - DNA, 3884 bp, Homo sapiens
  source 1..3884: mol_type = genomic DNA
  misc_feature 1..3884: note = cDNA of KCNH2 gene SNP c.3436A>T (p.Thr1146Ser)
atgccggtgcggaggggccacgtcgcgccgcagaacaccttcctggacaccatcatccgcaagtttgagggccagagccgtaagttcatcatcgccaacgctcgggtggagaactgcgccgtcatctactgcaacgacggcttctgcgagctgtgcggctactcgcgggccgaggtgatgcagcgaccctgcacctgcgacttcctgcacgggccgcgcacgcagcgccgcgctgccgcgcagatcgcgcaggcactgctgggcgccgaggagcgcaaagtggaaatcgccttctaccggaaagatgggagctgcttcctatgtctggtggatgtggtgcccgtgaagaacgaggatggggctgtcatcatgttcatcctcaatttcgaggtggtgatggagaaggacatggtggggtccccggctcatgacaccaaccaccggggcccccccaccagctggctggccccaggccgcgccaagaccttccgcctgaagctgcccgcgctgctggcgctgacggcccgggagtcgtcggtgcggtcgggcggcgcgggcggcgcgggcgccccgggggccgtggtggtggacgtggacctgacgcccgcggcacccagcagcgagtcgctggccctggacgaagtgacagccatggacaaccacgtggcagggctcgggcccgcggaggagcggcgtgcgctggtgggtcccggctctccgccccgcagcgcgcccggccagctcccatcgccccgggcgcacagcctcaaccccgacgcctcgggctccagctgcagcctggcccggacgcgctcccgagaaagctgcgccagcgtgcgccgcgcctcgtcggccgacgacatcgaggccatgcgcgccggggtgctgcccccgccaccgcgccacgccagcaccggggccatgcacccactgcgcagcggcttgctcaactccacctcggactccgacctcgtgcgctaccgcaccattagcaagattccccaaatcaccctcaactttgtggacctcaagggcgaccccttcttggcttcgcccaccagtgaccgtgagatcatagcacctaagataaaggagcgaacccacaatgtcactgagaaggtcacccaggtcctgtccctgggcgccgacgtgctgcctgagtacaagctgcaggcaccgcgcatccaccgctggaccatcctgcattacagccccttcaaggccgtgtgggactggctcatcctgctgctggtcatctacacggctgtcttcacaccctactcggctgccttcctgctgaaggagacggaagaaggcccgcctgctaccgagtgtggctacgcctgccagccgctggctgtggtggacctcatcgtggacatcatgttcattgtggacatcctcatcaacttccgcaccacctacgtcaatgccaacgaggaggtggtcagccaccccggccgcatcgccgtccactacttcaagggctggttcctcatcgacatggtggccgccatccccttcgacctgctcatcttcggctctggctctgaggagctgatcgggctgctgaagactgcgcggctgctgcggctggtgcgcgtggcgcggaagctggatcgctactcagagtacggcgcggccgtgctgttcttgctcatgtgcacctttgcgctcatcgcgcactggctagcctgcatctggtacgccatcggcaacatggagcagccacacatggactcacgcatcggctggctgcacaacctgggcgaccagataggcaaaccctacaacagcagcggcctgggcggcccctccatcaaggacaagtatgtgacggcgctctacttcaccttcagcagcctcaccagtgtgggcttcggcaacgtctctcccaacaccaactcagagaagatcttctccatctgcgtcatgctcattggctccctcatgtatgctagcatcttcggcaacgtgtcggccatcatccagcggctgtactcgggcacagcccgctaccacacacagatgctgcgggtgcgggagttcatccgcttccaccagatccccaatcccctgcgccagcgcctcgaggagtacttccagcacgcctggtcctacaccaacggcatcgacatgaacgcggtgctgaagggcttccctgagtgcctgcaggctgacatctgcctgcacctgaaccgctcactgctgcagcactgcaaacccttccgaggggccaccaagggctgccttcgggccctggccatgaagttcaagaccacacatgcaccgccaggggacacactggtgcatgctggggacctgctcaccgccctgtacttcatctcccggggctccatcgagatcctgcggggcgacgtcgtcgtggccatcctggggaagaatgacatctttggggagcctctgaacctgtatgcaaggcctggcaagtcgaacggggatgtgcgggccctcacctactgtgacctacacaagatccatcgggacgacctgctggaggtgctggacatgtaccctgagttctccgaccacttctggtccagcctggagatcaccttcaacctgcgagataccaacatgatcccgggctcccccggcagtacggagttagagggtggcttcagtcggcaacgcaagcgcaagttgtccttccgcaggcgcacggacaaggacacggagcagccaggggaggtgtcggccttggggccgggccgggcgggggcagggccgagtagccggggccggccgggggggccgtggggggagagcccgtccagtggcccctccagccctgagagcagtgaggatgagggcccaggccgcagctccagccccctccgcctggtgcccttctccagccccaggccccccggagagccgccgggtggggagcccctgatggaggactgcgagaagagcagcgacacttgcaaccccctgtcaggcgccttctcaggagtgtccaacattttcagcttctggggggacagtcggggccgccagtaccaggagctccctcgatgccccgcccccacccccagcctcctcaacatccccctctccagcccgggtcggcggccccggggcgacgtggagagcaggctggatgccctccagcgccagctcaacaggctggagacccggctgagtgcagacatggccactgtcctgcagctgctacagaggcagatgacgctggtcccgcccgcctacagtgctgtgaccaccccggggcctggccccacttccacatccccgctgttgcccgtcagccccctccccaccctcaccttggactcgctttctcaggtttcccagttcatggcgtgtgaggagctgcccccgggggccccagagcttccccaagaaggccccacacgacgcctctccctaccgggccagctgggggccctctcctcccagcccctgcacagacacggctcggacccgggcagttagtggggctgcccagtgtggacacgtggctcacccagggatcaaggcgctgctgggccgctccccttggaggccctgctcaggaggccctgaccgtggaaggggagaggaactcgaaagcacagctcctcccccagcccttgggaccatcttctcctgcagtcccctgggccccagtgagaggggcaggggcagggccggcagtaggtggggcctgtggtccccccactgccctgagggcattagctggtctaactgcccggaggcacccggccctgggccttaggcacctcaaggacttttctgctatttactgctcttattgttaaggataataattaaggatcatatgaataattaatgaagatgctgatgactatgaataataaataattatcctgaggaga

SEQ ID NO: 856 - DNA, 3884 bp, Homo sapiens
  source 1..3884: mol_type = genomic DNA
  misc_feature 1..3884: note = cDNA of KCNH2 gene SNP c.343G>A (p.Val115Met)
atgccggtgcggaggggccacgtcgcgccgcagaacaccttcctggacaccatcatccgcaagtttgagggccagagccgtaagttcatcatcgccaacgctcgggtggagaactgcgccgtcatctactgcaacgacggcttctgcgagctgtgcggctactcgcgggccgaggtgatgcagcgaccctgcacctgcgacttcctgcacgggccgcgcacgcagcgccgcgctgccgcgcagatcgcgcaggcactgctgggcgccgaggagcgcaaagtggaaatcgccttctaccggaaagatgggagctgcttcctatgtctggtggatgtggtgcccatgaagaacgaggatggggctgtcatcatgttcatcctcaatttcgaggtggtgatggagaaggacatggtggggtccccggctcatgacaccaaccaccggggcccccccaccagctggctggccccaggccgcgccaagaccttccgcctgaagctgcccgcgctgctggcgctgacggcccgggagtcgtcggtgcggtcgggcggcgcgggcggcgcgggcgccccgggggccgtggtggtggacgtggacctgacgcccgcggcacccagcagcgagtcgctggccctggacgaagtgacagccatggacaaccacgtggcagggctcgggcccgcggaggagcggcgtgcgctggtgggtcccggctctccgccccgcagcgcgcccggccagctcccatcgccccgggcgcacagcctcaaccccgacgcctcgggctccagctgcagcctggcccggacgcgctcccgagaaagctgcgccagcgtgcgccgcgcctcgtcggccgacgacatcgaggccatgcgcgccggggtgctgcccccgccaccgcgccacgccagcaccggggccatgcacccactgcgcagcggcttgctcaactccacctcggactccgacctcgtgcgctaccgcaccattagcaagattccccaaatcaccctcaactttgtggacctcaagggcgaccccttcttggcttcgcccaccagtgaccgtgagatcatagcacctaagataaaggagcgaacccacaatgtcactgagaaggtcacccaggtcctgtccctgggcgccgacgtgctgcctgagtacaagctgcaggcaccgcgcatccaccgctggaccatcctgcattacagccccttcaaggccgtgtgggactggctcatcctgctgctggtcatctacacggctgtcttcacaccctactcggctgccttcctgctgaaggagacggaagaaggcccgcctgctaccgagtgtggctacgcctgccagccgctggctgtggtggacctcatcgtggacatcatgttcattgtggacatcctcatcaacttccgcaccacctacgtcaatgccaacgaggaggtggtcagccaccccggccgcatcgccgtccactacttcaagggctggttcctcatcgacatggtggccgccatccccttcgacctgctcatcttcggctctggctctgaggagctgatcgggctgctgaagactgcgcggctgctgcggctggtgcgcgtggcgcggaagctggatcgctactcagagtacggcgcggccgtgctgttcttgctcatgtgcacctttgcgctcatcgcgcactggctagcctgcatctggtacgccatcggcaacatggagcagccacacatggactcacgcatcggctggctgcacaacctgggcgaccagataggcaaaccctacaacagcagcggcctgggcggcccctccatcaaggacaagtatgtgacggcgctctacttcaccttcagcagcctcaccagtgtgggcttcggcaacgtctctcccaacaccaactcagagaagatcttctccatctgcgtcatgctcattggctccctcatgtatgctagcatcttcggcaacgtgtcggccatcatccagcggctgtactcgggcacagcccgctaccacacacagatgctgcgggtgcgggagttcatccgcttccaccagatccccaatcccctgcgccagcgcctcgaggagtacttccagcacgcctggtcctacaccaacggcatcgacatgaacgcggtgctgaagggcttccctgagtgcctgcaggctgacatctgcctgcacctgaaccgctcactgctgcagcactgcaaacccttccgaggggccaccaagggctgccttcgggccctggccatgaagttcaagaccacacatgcaccgccaggggacacactggtgcatgctggggacctgctcaccgccctgtacttcatctcccggggctccatcgagatcctgcggggcgacgtcgtcgtggccatcctggggaagaatgacatctttggggagcctctgaacctgtatgcaaggcctggcaagtcgaacggggatgtgcgggccctcacctactgtgacctacacaagatccatcgggacgacctgctggaggtgctggacatgtaccctgagttctccgaccacttctggtccagcctggagatcaccttcaacctgcgagataccaacatgatcccgggctcccccggcagtacggagttagagggtggcttcagtcggcaacgcaagcgcaagttgtccttccgcaggcgcacggacaaggacacggagcagccaggggaggtgtcggccttggggccgggccgggcgggggcagggccgagtagccggggccggccgggggggccgtggggggagagcccgtccagtggcccctccagccctgagagcagtgaggatgagggcccaggccgcagctccagccccctccgcctggtgcccttctccagccccaggccccccggagagccgccgggtggggagcccctgatggaggactgcgagaagagcagcgacacttgcaaccccctgtcaggcgccttctcaggagtgtccaacattttcagcttctggggggacagtcggggccgccagtaccaggagctccctcgatgccccgcccccacccccagcctcctcaacatccccctctccagcccgggtcggcggccccggggcgacgtggagagcaggctggatgccctccagcgccagctcaacaggctggagacccggctgagtgcagacatggccactgtcctgcagctgctacagaggcagatgacgctggtcccgcccgcctacagtgctgtgaccaccccggggcctggccccacttccacatccccgctgttgcccgtcagccccctccccaccctcaccttggactcgctttctcaggtttcccagttcatggcgtgtgaggagctgcccccgggggccccagagcttccccaagaaggccccacacgacgcctctccctaccgggccagctgggggccctcacctcccagcccctgcacagacacggctcggacccgggcagttagtggggctgcccagtgtggacacgtggctcacccagggatcaaggcgctgctgggccgctccccttggaggccctgctcaggaggccctgaccgtggaaggggagaggaactcgaaagcacagctcctcccccagcccttgggaccatcttctcctgcagtcccctgggccccagtgagaggggcaggggcagggccggcagtaggtggggcctgtggtccccccactgccctgagggcattagctggtctaactgcccggaggcacccggccctgggccttaggcacctcaaggacttttctgctatttactgctcttattgttaaggataataattaaggatcatatgaataattaatgaagatgctgatgactatgaataataaataattatcctgaggaga

SEQ ID NO: 857 - DNA, 3884 bp, Homo sapiens
  source 1..3884: mol_type = genomic DNA
  misc_feature 1..3884: note = cDNA of KCNH2 gene SNP c.3448C>A (p.Leu1150Met)
atgccggtgcggaggggccacgtcgcgccgcagaacaccttcctggacaccatcatccgcaagtttgagggccagagccgtaagttcatcatcgccaacgctcgggtggagaactgcgccgtcatctactgcaacgacggcttctgcgagctgtgcggctactcgcgggccgaggtgatgcagcgaccctgcacctgcgacttcctgcacgggccgcgcacgcagcgccgcgctgccgcgcagatcgcgcaggcactgctgggcgccgaggagcgcaaagtggaaatcgccttctaccggaaagatgggagctgcttcctatgtctggtggatgtggtgcccgtgaagaacgaggatggggctgtcatcatgttcatcctcaatttcgaggtggtgatggagaaggacatggtggggtccccggctcatgacaccaaccaccggggcccccccaccagctggctggccccaggccgcgccaagaccttccgcctgaagctgcccgcgctgctggcgctgacggcccgggagtcgtcggtgcggtcgggcggcgcgggcggcgcgggcgccccgggggccgtggtggtggacgtggacctgacgcccgcggcacccagcagcgagtcgctggccctggacgaagtgacagccatggacaaccacgtggcagggctcgggcccgcggaggagcggcgtgcgctggtgggtcccggctctccgccccgcagcgcgcccggccagctcccatcgccccgggcgcacagcctcaaccccgacgcctcgggctccagctgcagcctggcccggacgcgctcccgagaaagctgcgccagcgtgcgccgcgcctcgtcggccgacgacatcgaggccatgcgcgccggggtgctgcccccgccaccgcgccacgccagcaccggggccatgcacccactgcgcagcggcttgctcaactccacctcggactccgacctcgtgcgctaccgcaccattagcaagattccccaaatcaccctcaactttgtggacctcaagggcgaccccttcttggcttcgcccaccagtgaccgtgagatcatagcacctaagataaaggagcgaacccacaatgtcactgagaaggtcacccaggtcctgtccctgggcgccgacgtgctgcctgagtacaagctgcaggcaccgcgcatccaccgctggaccatcctgcattacagccccttcaaggccgtgtgggactggctcatcctgctgctggtcatctacacggctgtcttcacaccctactcggctgccttcctgctgaaggagacggaagaaggcccgcctgctaccgagtgtggctacgcctgccagccgctggctgtggtggacctcatcgtggacatcatgttcattgtggacatcctcatcaacttccgcaccacctacgtcaatgccaacgaggaggtggtcagccaccccggccgcatcgccgtccactacttcaagggctggttcctcatcgacatggtggccgccatccccttcgacctgctcatcttcggctctggctctgaggagctgatcgggctgctgaagactgcgcggctgctgcggctggtgcgcgtggcgcggaagctggatcgctactcagagtacggcgcggccgtgctgttcttgctcatgtgcacctttgcgctcatcgcgcactggctagcctgcatctggtacgccatcggcaacatggagcagccacacatggactcacgcatcggctggctgcacaacctgggcgaccagataggcaaaccctacaacagcagcggcctgggcggcccctccatcaaggacaagtatgtgacggcgctctacttcaccttcagcagcctcaccagtgtgggcttcggcaacgtctctcccaacaccaactcagagaagatcttctccatctgcgtcatgctcattggctccctcatgtatgctagcatcttcggcaacgtgtcggccatcatccagcggctgtactcgggcacagcccgctaccacacacagatgctgcgggtgcgggagttcatccgcttccaccagatccccaatcccctgcgccagcgcctcgaggagtacttccagcacgcctggtcctacaccaacggcatcgacatgaacgcggtgctgaagggcttccctgagtgcctgcaggctgacatctgcctgcacctgaaccgctcactgctgcagcactgcaaacccttccgaggggccaccaagggctgccttcgggccctggccatgaagttcaagaccacacatgcaccgccaggggacacactggtgcatgctggggacctgctcaccgccctgtacttcatctcccggggctccatcgagatcctgcggggcgacgtcgtcgtggccatcctggggaagaatgacatctttggggagcctctgaacctgtatgcaaggcctggcaagtcgaacggggatgtgcgggccctcacctactgtgacctacacaagatccatcgggacgacctgctggaggtgctggacatgtaccctgagttctccgaccacttctggtccagcctggagatcaccttcaacctgcgagataccaacatgatcccgggctcccccggcagtacggagttagagggtggcttcagtcggcaacgcaagcgcaagttgtccttccgcaggcgcacggacaaggacacggagcagccaggggaggtgtcggccttggggccgggccgggcgggggcagggccgagtagccggggccggccgggggggccgtggggggagagcccgtccagtggcccctccagccctgagagcagtgaggatgagggcccaggccgcagctccagccccctccgcctggtgcccttctccagccccaggccccccggagagccgccgggtggggagcccctgatggaggactgcgagaagagcagcgacacttgcaaccccctgtcaggcgccttctcaggagtgtccaacattttcagcttctggggggacagtcggggccgccagtaccaggagctccctcgatgccccgcccccacccccagcctcctcaacatccccctctccagcccgggtcggcggccccggggcgacgtggagagcaggctggatgccctccagcgccagctcaacaggctggagacccggctgagtgcagacatggccactgtcctgcagctgctacagaggcagatgacgctggtcccgcccgcctacagtgctgtgaccaccccggggcctggccccacttccacatccccgctgttgcccgtcagccccctccccaccctcaccttggactcgctttctcaggtttcccagttcatggcgtgtgaggagctgcccccgggggccccagagcttccccaagaaggccccacacgacgcctctccctaccgggccagctgggggccctcacctcccagcccatgcacagacacggctcggacccgggcagttagtggggctgcccagtgtggacacgtggctcacccagggatcaaggcgctgctgggccgctccccttggaggccctgctcaggaggccctgaccgtggaaggggagaggaactcgaaagcacagctcctcccccagcccttgggaccatcttctcctgcagtcccctgggccccagtgagaggggcaggggcagggccggcagtaggtggggcctgtggtccccccactgccctgagggcattagctggtctaactgcccggaggcacccggccctgggccttaggcacctcaaggacttttctgctatttactgctcttattgttaaggataataattaaggatcatatgaataattaatgaagatgctgatgactatgaataataaataattatcctgaggaga

SEQ ID NO: 858 - DNA, 3884 bp, Homo sapiens
  source 1..3884: mol_type = genomic DNA
  misc_feature 1..3884: note = cDNA of KCNH2 gene SNP c.344T>G (p.Val115Gly)
atgccggtgcggaggggccacgtcgcgccgcagaacaccttcctggacaccatcatccgcaagtttgagggccagagccgtaagttcatcatcgccaacgctcgggtggagaactgcgccgtcatctactgcaacgacggcttctgcgagctgtgcggctactcgcgggccgaggtgatgcagcgaccctgcacctgcgacttcctgcacgggccgcgcacgcagcgccgcgctgccgcgcagatcgcgcaggcactgctgggcgccgaggagcgcaaagtggaaatcgccttctaccggaaagatgggagctgcttcctatgtctggtggatgtggtgcccgggaagaacgaggatggggctgtcatcatgttcatcctcaatttcgaggtggtgatggagaaggacatggtggggtccccggctcatgacaccaaccaccggggcccccccaccagctggctggccccaggccgcgccaagaccttccgcctgaagctgcccgcgctgctggcgctgacggcccgggagtcgtcggtgcggtcgggcggcgcgggcggcgcgggcgccccgggggccgtggtggtggacgtggacctgacgcccgcggcacccagcagcgagtcgctggccctggacgaagtgacagccatggacaaccacgtggcagggctcgggcccgcggaggagcggcgtgcgctggtgggtcccggctctccgccccgcagcgcgcccggccagctcccatcgccccgggcgcacagcctcaaccccgacgcctcgggctccagctgcagcctggcccggacgcgctcccgagaaagctgcgccagcgtgcgccgcgcctcgtcggccgacgacatcgaggccatgcgcgccggggtgctgcccccgccaccgcgccacgccagcaccggggccatgcacccactgcgcagcggcttgctcaactccacctcggactccgacctcgtgcgctaccgcaccattagcaagattccccaaatcaccctcaactttgtggacctcaagggcgaccccttcttggcttcgcccaccagtgaccgtgagatcatagcacctaagataaaggagcgaacccacaatgtcactgagaaggtcacccaggtcctgtccctgggcgccgacgtgctgcctgagtacaagctgcaggcaccgcgcatccaccgctggaccatcctgcattacagccccttcaaggccgtgtgggactggctcatcctgctgctggtcatctacacggctgtcttcacaccctactcggctgccttcctgctgaaggagacggaagaaggcccgcctgctaccgagtgtggctacgcctgccagccgctggctgtggtggacctcatcgtggacatcatgttcattgtggacatcctcatcaacttccgcaccacctacgtcaatgccaacgaggaggtggtcagccaccccggccgcatcgccgtccactacttcaagggctggttcctcatcgacatggtggccgccatccccttcgacctgctcatcttcggctctggctctgaggagctgatcgggctgctgaagactgcgcggctgctgcggctggtgcgcgtggcgcggaagctggatcgctactcagagtacggcgcggccgtgctgttcttgctcatgtgcacctttgcgctcatcgcgcactggctagcctgcatctggtacgccatcggcaacatggagcagccacacatggactcacgcatcggctggctgcacaacctgggcgaccagataggcaaaccctacaacagcagcggcctgggcggcccctccatcaaggacaagtatgtgacggcgctctacttcaccttcagcagcctcaccagtgtgggcttcggcaacgtctctcccaacaccaactcagagaagatcttctccatctgcgtcatgctcattggctccctcatgtatgctagcatcttcggcaacgtgtcggccatcatccagcggctgtactcgggcacagcccgctaccacacacagatgctgcgggtgcgggagttcatccgcttccaccagatccccaatcccctgcgccagcgcctcgaggagtacttccagcacgcctggtcctacaccaacggcatcgacatgaacgcggtgctgaagggcttccctgagtgcctgcaggctgacatctgcctgcacctgaaccgctcactgctgcagcactgcaaacccttccgaggggccaccaagggctgccttcgggccctggccatgaagttcaagaccacacatgcaccgccaggggacacactggtgcatgctggggacctgctcaccgccctgtacttcatctcccggggctccatcgagatcctgcggggcgacgtcgtcgtggccatcctggggaagaatgacatctttggggagcctctgaacctgtatgcaaggcctggcaagtcgaacggggatgtgcgggccctcacctactgtgacctacacaagatccatcgggacgacctgctggaggtgctggacatgtaccctgagttctccgaccacttctggtccagcctggagatcaccttcaacctgcgagataccaacatgatcccgggctcccccggcagtacggagttagagggtggcttcagtcggcaacgcaagcgcaagttgtccttccgcaggcgcacggacaaggacacggagcagccaggggaggtgtcggccttggggccgggccgggcgggggcagggccgagtagccggggccggccgggggggccgtggggggagagcccgtccagtggcccctccagccctgagagcagtgaggatgagggcccaggccgcagctccagccccctccgcctggtgcccttctccagccccaggccccccggagagccgccgggtggggagcccctgatggaggactgcgagaagagcagcgacacttgcaaccccctgtcaggcgccttctcaggagtgtccaacattttcagcttctggggggacagtcggggccgccagtaccaggagctccctcgatgccccgcccccacccccagcctcctcaacatccccctctccagcccgggtcggcggccccggggcgacgtggagagcaggctggatgccctccagcgccagctcaacaggctggagacccggctgagtgcagacatggccactgtcctgcagctgctacagaggcagatgacgctggtcccgcccgcctacagtgctgtgaccaccccggggcctggccccacttccacatccccgctgttgcccgtcagccccctccccaccctcaccttggactcgctttctcaggtttcccagttcatggcgtgtgaggagctgcccccgggggccccagagcttccccaagaaggccccacacgacgcctctccctaccgggccagctgggggccctcacctcccagcccctgcacagacacggctcggacccgggcagttagtggggctgcccagtgtggacacgtggctcacccagggatcaaggcgctgctgggccgctccccttggaggccctgctcaggaggccctgaccgtggaaggggagaggaactcgaaagcacagctcctcccccagcccttgggaccatcttctcctgcagtcccctgggccccagtgagaggggcaggggcagggccggcagtaggtggggcctgtggtccccccactgccctgagggcattagctggtctaactgcccggaggcacccggccctgggccttaggcacctcaaggacttttctgctatttactgctcttattgttaaggataataattaaggatcatatgaataattaatgaagatgctgatgactatgaataataaataattatcctgaggaga

SEQ ID NO: 859 - DNA, 3884 bp, Homo sapiens
  source 1..3884: mol_type = genomic DNA
  misc_feature 1..3884: note = cDNA of KCNH2 gene SNP c.3453C>A (p.His1151Gln)
atgccggtgcggaggggccacgtcgcgccgcagaacaccttcctggacaccatcatccgcaagtttgagggccagagccgtaagttcatcatcgccaacgctcgggtggagaactgcgccgtcatctactgcaacgacggcttctgcgagctgtgcggctactcgcgggccgaggtgatgcagcgaccctgcacctgcgacttcctgcacgggccgcgcacgcagcgccgcgctgccgcgcagatcgcgcaggcactgctgggcgccgaggagcgcaaagtggaaatcgccttctaccggaaagatgggagctgcttcctatgtctggtggatgtggtgcccgtgaagaacgaggatggggctgtcatcatgttcatcctcaatttcgaggtggtgatggagaaggacatggtggggtccccggctcatgacaccaaccaccggggcccccccaccagctggctggccccaggccgcgccaagaccttccgcctgaagctgcccgcgctgctggcgctgacggcccgggagtcgtcggtgcggtcgggcggcgcgggcggcgcgggcgccccgggggccgtggtggtggacgtggacctgacgcccgcggcacccagcagcgagtcgctggccctggacgaagtgacagccatggacaaccacgtggcagggctcgggcccgcggaggagcggcgtgcgctggtgggtcccggctctccgccccgcagcgcgcccggccagctcccatcgccccgggcgcacagcctcaaccccgacgcctcgggctccagctgcagcctggcccggacgcgctcccgagaaagctgcgccagcgtgcgccgcgcctcgtcggccgacgacatcgaggccatgcgcgccggggtgctgcccccgccaccgcgccacgccagcaccggggccatgcacccactgcgcagcggcttgctcaactccacctcggactccgacctcgtgcgctaccgcaccattagcaagattccccaaatcaccctcaactttgtggacctcaagggcgaccccttcttggcttcgcccaccagtgaccgtgagatcatagcacctaagataaaggagcgaacccacaatgtcactgagaaggtcacccaggtcctgtccctgggcgccgacgtgctgcctgagtacaagctgcaggcaccgcgcatccaccgctggaccatcctgcattacagccccttcaaggccgtgtgggactggctcatcctgctgctggtcatctacacggctgtcttcacaccctactcggctgccttcctgctgaaggagacggaagaaggcccgcctgctaccgagtgtggctacgcctgccagccgctggctgtggtggacctcatcgtggacatcatgttcattgtggacatcctcatcaacttccgcaccacctacgtcaatgccaacgaggaggtggtcagccaccccggccgcatcgccgtccactacttcaagggctggttcctcatcgacatggtggccgccatccccttcgacctgctcatcttcggctctggctctgaggagctgatcgggctgctgaagactgcgcggctgctgcggctggtgcgcgtggcgcggaagctggatcgctactcagagtacggcgcggccgtgctgttcttgctcatgtgcacctttgcgctcatcgcgcactggctagcctgcatctggtacgccatcggcaacatggagcagccacacatggactcacgcatcggctggctgcacaacctgggcgaccagataggcaaaccctacaacagcagcggcctgggcggcccctccatcaaggacaagtatgtgacggcgctctacttcaccttcagcagcctcaccagtgtgggcttcggcaacgtctctcccaacaccaactcagagaagatcttctccatctgcgtcatgctcattggctccctcatgtatgctagcatcttcggcaacgtgtcggccatcatccagcggctgtactcgggcacagcccgctaccacacacagatgctgcgggtgcgggagttcatccgcttccaccagatccccaatcccctgcgccagcgcctcgaggagtacttccagcacgcctggtcctacaccaacggcatcgacatgaacgcggtgctgaagggcttccctgagtgcctgcaggctgacatctgcctgcacctgaaccgctcactgctgcagcactgcaaacccttccgaggggccaccaagggctgccttcgggccctggccatgaagttcaagaccacacatgcaccgccaggggacacactggtgcatgctggggacctgctcaccgccctgtacttcatctcccggggctccatcgagatcctgcggggcgacgtcgtcgtggccatcctggggaagaatgacatctttggggagcctctgaacctgtatgcaaggcctggcaagtcgaacggggatgtgcgggccctcacctactgtgacctacacaagatccatcgggacgacctgctggaggtgctggacatgtaccctgagttctccgaccacttctggtccagcctggagatcaccttcaacctgcgagataccaacatgatcccgggctcccccggcagtacggagttagagggtggcttcagtcggcaacgcaagcgcaagttgtccttccgcaggcgcacggacaaggacacggagcagccaggggaggtgtcggccttggggccgggccgggcgggggcagggccgagtagccggggccggccgggggggccgtggggggagagcccgtccagtggcccctccagccctgagagcagtgaggatgagggcccaggccgcagctccagccccctccgcctggtgcccttctccagccccaggccccccggagagccgccgggtggggagcccctgatggaggactgcgagaagagcagcgacacttgcaaccccctgtcaggcgccttctcaggagtgtccaacattttcagcttctggggggacagtcggggccgccagtaccaggagctccctcgatgccccgcccccacccccagcctcctcaacatccccctctccagcccgggtcggcggccccggggcgacgtggagagcaggctggatgccctccagcgccagctcaacaggctggagacccggctgagtgcagacatggccactgtcctgcagctgctacagaggcagatgacgctggtcccgcccgcctacagtgctgtgaccaccccggggcctggccccacttccacatccccgctgttgcccgtcagccccctccccaccctcaccttggactcgctttctcaggtttcccagttcatggcgtgtgaggagctgcccccgggggccccagagcttccccaagaaggccccacacgacgcctctccctaccgggccagctgggggccctcacctcccagcccctgcaaagacacggctcggacccgggcagttagtggggctgcccagtgtggacacgtggctcacccagggatcaaggcgctgctgggccgctccccttggaggccctgctcaggaggccctgaccgtggaaggggagaggaactcgaaagcacagctcctcccccagcccttgggaccatcttctcctgcagtcccctgggccccagtgagaggggcaggggcagggccggcagtaggtggggcctgtggtccccccactgccctgagggcattagctggtctaactgcccggaggcacccggccctgggccttaggcacctcaaggacttttctgctatttactgctcttattgttaaggataataattaaggatcatatgaataattaatgaagatgctgatgactatgaataataaataattatcctgaggaga

SEQ ID NO: 860 - DNA, 3884 bp, Homo sapiens
  source 1..3884: mol_type = genomic DNA
  misc_feature 1..3884: note = cDNA of KCNH2 gene SNP c.3457C>T (p.His1153Tyr)
atgccggtgcggaggggccacgtcgcgccgcagaacaccttcctggacaccatcatccgcaagtttgagggccagagccgtaagttcatcatcgccaacgctcgggtggagaactgcgccgtcatctactgcaacgacggcttctgcgagctgtgcggctactcgcgggccgaggtgatgcagcgaccctgcacctgcgacttcctgcacgggccgcgcacgcagcgccgcgctgccgcgcagatcgcgcaggcactgctgggcgccgaggagcgcaaagtggaaatcgccttctaccggaaagatgggagctgcttcctatgtctggtggatgtggtgcccgtgaagaacgaggatggggctgtcatcatgttcatcctcaatttcgaggtggtgatggagaaggacatggtggggtccccggctcatgacaccaaccaccggggcccccccaccagctggctggccccaggccgcgccaagaccttccgcctgaagctgcccgcgctgctggcgctgacggcccgggagtcgtcggtgcggtcgggcggcgcgggcggcgcgggcgccccgggggccgtggtggtggacgtggacctgacgcccgcggcacccagcagcgagtcgctggccctggacgaagtgacagccatggacaaccacgtggcagggctcgggcccgcggaggagcggcgtgcgctggtgggtcccggctctccgccccgcagcgcgcccggccagctcccatcgccccgggcgcacagcctcaaccccgacgcctcgggctccagctgcagcctggcccggacgcgctcccgagaaagctgcgccagcgtgcgccgcgcctcgtcggccgacgacatcgaggccatgcgcgccggggtgctgcccccgccaccgcgccacgccagcaccggggccatgcacccactgcgcagcggcttgctcaactccacctcggactccgacctcgtgcgctaccgcaccattagcaagattccccaaatcaccctcaactttgtggacctcaagggcgaccccttcttggcttcgcccaccagtgaccgtgagatcatagcacctaagataaaggagcgaacccacaatgtcactgagaaggtcacccaggtcctgtccctgggcgccgacgtgctgcctgagtacaagctgcaggcaccgcgcatccaccgctggaccatcctgcattacagccccttcaaggccgtgtgggactggctcatcctgctgctggtcatctacacggctgtcttcacaccctactcggctgccttcctgctgaaggagacggaagaaggcccgcctgctaccgagtgtggctacgcctgccagccgctggctgtggtggacctcatcgtggacatcatgttcattgtggacatcctcatcaacttccgcaccacctacgtcaatgccaacgaggaggtggtcagccaccccggccgcatcgccgtccactacttcaagggctggttcctcatcgacatggtggccgccatccccttcgacctgctcatcttcggctctggctctgaggagctgatcgggctgctgaagactgcgcggctgctgcggctggtgcgcgtggcgcggaagctggatcgctactcagagtacggcgcggccgtgctgttcttgctcatgtgcacctttgcgctcatcgcgcactggctagcctgcatctggtacgccatcggcaacatggagcagccacacatggactcacgcatcggctggctgcacaacctgggcgaccagataggcaaaccctacaacagcagcggcctgggcggcccctccatcaaggacaagtatgtgacggcgctctacttcaccttcagcagcctcaccagtgtgggcttcggcaacgtctctcccaacaccaactcagagaagatcttctccatctgcgtcatgctcattggctccctcatgtatgctagcatcttcggcaacgtgtcggccatcatccagcggctgtactcgggcacagcccgctaccacacacagatgctgcgggtgcgggagttcatccgcttccaccagatccccaatcccctgcgccagcgcctcgaggagtacttccagcacgcctggtcctacaccaacggcatcgacatgaacgcggtgctgaagggcttccctgagtgcctgcaggctgacatctgcctgcacctgaaccgctcactgctgcagcactgcaaacccttccgaggggccaccaagggctgccttcgggccctggccatgaagttcaagaccacacatgcaccgccaggggacacactggtgcatgctggggacctgctcaccgccctgtacttcatctcccggggctccatcgagatcctgcggggcgacgtcgtcgtggccatcctggggaagaatgacatctttggggagcctctgaacctgtatgcaaggcctggcaagtcgaacggggatgtgcgggccctcacctactgtgacctacacaagatccatcgggacgacctgctggaggtgctggacatgtaccctgagttctccgaccacttctggtccagcctggagatcaccttcaacctgcgagataccaacatgatcccgggctcccccggcagtacggagttagagggtggcttcagtcggcaacgcaagcgcaagttgtccttccgcaggcgcacggacaaggacacggagcagccaggggaggtgtcggccttggggccgggccgggcgggggcagggccgagtagccggggccggccgggggggccgtggggggagagcccgtccagtggcccctccagccctgagagcagtgaggatgagggcccaggccgcagctccagccccctccgcctggtgcccttctccagccccaggccccccggagagccgccgggtggggagcccctgatggaggactgcgagaagagcagcgacacttgcaaccccctgtcaggcgccttctcaggagtgtccaacattttcagcttctggggggacagtcggggccgccagtaccaggagctccctcgatgccccgcccccacccccagcctcctcaacatccccctctccagcccgggtcggcggccccggggcgacgtggagagcaggctggatgccctccagcgccagctcaacaggctggagacccggctgagtgcagacatggccactgtcctgcagctgctacagaggcagatgacgctggtcccgcccgcctacagtgctgtgaccaccccggggcctggccccacttccacatccccgctgttgcccgtcagccccctccccaccctcaccttggactcgctttctcaggtttcccagttcatggcgtgtgaggagctgcccccgggggccccagagcttccccaagaaggccccacacgacgcctctccctaccgggccagctgggggccctcacctcccagcccctgcacagatacggctcggacccgggcagttagtggggctgcccagtgtggacacgtggctcacccagggatcaaggcgctgctgggccgctccccttggaggccctgctcaggaggccctgaccgtggaaggggagaggaactcgaaagcacagctcctcccccagcccttgggaccatcttctcctgcagtcccctgggccccagtgagaggggcaggggcagggccggcagtaggtggggcctgtggtccccccactgccctgagggcattagctggtctaactgcccggaggcacccggccctgggccttaggcacctcaaggacttttctgctatttactgctcttattgttaaggataataattaaggatcatatgaataattaatgaagatgctgatgactatgaataataaataattatcctgaggaga

SEQ ID NO: 861 - DNA, 3884 bp, Homo sapiens
  source 1..3884: mol_type = genomic DNA
  misc_feature 1..3884: note = cDNA of KCNH2 gene SNP c.3460G>A (p.Gly1154Ser)
atgccggtgcggaggggccacgtcgcgccgcagaacaccttcctggacaccatcatccgcaagtttgagggccagagccgtaagttcatcatcgccaacgctcgggtggagaactgcgccgtcatctactgcaacgacggcttctgcgagctgtgcggctactcgcgggccgaggtgatgcagcgaccctgcacctgcgacttcctgcacgggccgcgcacgcagcgccgcgctgccgcgcagatcgcgcaggcactgctgggcgccgaggagcgcaaagtggaaatcgccttctaccggaaagatgggagctgcttcctatgtctggtggatgtggtgcccgtgaagaacgaggatggggctgtcatcatgttcatcctcaatttcgaggtggtgatggagaaggacatggtggggtccccggctcatgacaccaaccaccggggcccccccaccagctggctggccccaggccgcgccaagaccttccgcctgaagctgcccgcgctgctggcgctgacggcccgggagtcgtcggtgcggtcgggcggcgcgggcggcgcgggcgccccgggggccgtggtggtggacgtggacctgacgcccgcggcacccagcagcgagtcgctggccctggacgaagtgacagccatggacaaccacgtggcagggctcgggcccgcggaggagcggcgtgcgctggtgggtcccggctctccgccccgcagcgcgcccggccagctcccatcgccccgggcgcacagcctcaaccccgacgcctcgggctccagctgcagcctggcccggacgcgctcccgagaaagctgcgccagcgtgcgccgcgcctcgtcggccgacgacatcgaggccatgcgcgccggggtgctgcccccgccaccgcgccacgccagcaccggggccatgcacccactgcgcagcggcttgctcaactccacctcggactccgacctcgtgcgctaccgcaccattagcaagattccccaaatcaccctcaactttgtggacctcaagggcgaccccttcttggcttcgcccaccagtgaccgtgagatcatagcacctaagataaaggagcgaacccacaatgtcactgagaaggtcacccaggtcctgtccctgggcgccgacgtgctgcctgagtacaagctgcaggcaccgcgcatccaccgctggaccatcctgcattacagccccttcaaggccgtgtgggactggctcatcctgctgctggtcatctacacggctgtcttcacaccctactcggctgccttcctgctgaaggagacggaagaaggcccgcctgctaccgagtgtggctacgcctgccagccgctggctgtggtggacctcatcgtggacatcatgttcattgtggacatcctcatcaacttccgcaccacctacgtcaatgccaacgaggaggtggtcagccaccccggccgcatcgccgtccactacttcaagggctggttcctcatcgacatggtggccgccatccccttcgacctgctcatcttcggctctggctctgaggagctgatcgggctgctgaagactgcgcggctgctgcggctggtgcgcgtggcgcggaagctggatcgctactcagagtacggcgcggccgtgctgttcttgctcatgtgcacctttgcgctcatcgcgcactggctagcctgcatctggtacgccatcggcaacatggagcagccacacatggactcacgcatcggctggctgcacaacctgggcgaccagataggcaaaccctacaacagcagcggcctgggcggcccctccatcaaggacaagtatgtgacggcgctctacttcaccttcagcagcctcaccagtgtgggcttcggcaacgtctctcccaacaccaactcagagaagatcttctccatctgcgtcatgctcattggctccctcatgtatgctagcatcttcggcaacgtgtcggccatcatccagcggctgtactcgggcacagcccgctaccacacacagatgctgcgggtgcgggagttcatccgcttccaccagatccccaatcccctgcgccagcgcctcgaggagtacttccagcacgcctggtcctacaccaacggcatcgacatgaacgcggtgctgaagggcttccctgagtgcctgcaggctgacatctgcctgcacctgaaccgctcactgctgcagcactgcaaacccttccgaggggccaccaagggctgccttcgggccctggccatgaagttcaagaccacacatgcaccgccaggggacacactggtgcatgctggggacctgctcaccgccctgtacttcatctcccggggctccatcgagatcctgcggggcgacgtcgtcgtggccatcctggggaagaatgacatctttggggagcctctgaacctgtatgcaaggcctggcaagtcgaacggggatgtgcgggccctcacctactgtgacctacacaagatccatcgggacgacctgctggaggtgctggacatgtaccctgagttctccgaccacttctggtccagcctggagatcaccttcaacctgcgagataccaacatgatcccgggctcccccggcagtacggagttagagggtggcttcagtcggcaacgcaagcgcaagttgtccttccgcaggcgcacggacaaggacacggagcagccaggggaggtgtcggccttggggccgggccgggcgggggcagggccgagtagccggggccggccgggggggccgtggggggagagcccgtccagtggcccctccagccctgagagcagtgaggatgagggcccaggccgcagctccagccccctccgcctggtgcccttctccagccccaggccccccggagagccgccgggtggggagcccctgatggaggactgcgagaagagcagcgacacttgcaaccccctgtcaggcgccttctcaggagtgtccaacattttcagcttctggggggacagtcggggccgccagtaccaggagctccctcgatgccccgcccccacccccagcctcctcaacatccccctctccagcccgggtcggcggccccggggcgacgtggagagcaggctggatgccctccagcgccagctcaacaggctggagacccggctgagtgcagacatggccactgtcctgcagctgctacagaggcagatgacgctggtcccgcccgcctacagtgctgtgaccaccccggggcctggccccacttccacatccccgctgttgcccgtcagccccctccccaccctcaccttggactcgctttctcaggtttcccagttcatggcgtgtgaggagctgcccccgggggccccagagcttccccaagaaggccccacacgacgcctctccctaccgggccagctgggggccctcacctcccagcccctgcacagacacagctcggacccgggcagttagtggggctgcccagtgtggacacgtggctcacccagggatcaaggcgctgctgggccgctccccttggaggccctgctcaggaggccctgaccgtggaaggggagaggaactcgaaagcacagctcctcccccagcccttgggaccatcttctcctgcagtcccctgggccccagtgagaggggcaggggcagggccggcagtaggtggggcctgtggtccccccactgccctgagggcattagctggtctaactgcccggaggcacccggccctgggccttaggcacctcaaggacttttctgctatttactgctcttattgttaaggataataattaaggatcatatgaataattaatgaagatgctgatgactatgaataataaataattatcctgaggaga

SEQ ID NO: 862 - DNA, 3884 bp, Homo sapiens
  source 1..3884: mol_type = genomic DNA
  misc_feature 1..3884: note = cDNA of KCNH2 gene SNP c.3464C>T (p.Ser1155Leu)
atgccggtgcggaggggccacgtcgcgccgcagaacaccttcctggacaccatcatccgcaagtttgagggccagagccgtaagttcatcatcgccaacgctcgggtggagaactgcgccgtcatctactgcaacgacggcttctgcgagctgtgcggctactcgcgggccgaggtgatgcagcgaccctgcacctgcgacttcctgcacgggccgcgcacgcagcgccgcgctgccgcgcagatcgcgcaggcactgctgggcgccgaggagcgcaaagtggaaatcgccttctaccggaaagatgggagctgcttcctatgtctggtggatgtggtgcccgtgaagaacgaggatggggctgtcatcatgttcatcctcaatttcgaggtggtgatggagaaggacatggtggggtccccggctcatgacaccaaccaccggggcccccccaccagctggctggccccaggccgcgccaagaccttccgcctgaagctgcccgcgctgctggcgctgacggcccgggagtcgtcggtgcggtcgggcggcgcgggcggcgcgggcgccccgggggccgtggtggtggacgtggacctgacgcccgcggcacccagcagcgagtcgctggccctggacgaagtgacagccatggacaaccacgtggcagggctcgggcccgcggaggagcggcgtgcgctggtgggtcccggctctccgccccgcagcgcgcccggccagctcccatcgccccgggcgcacagcctcaaccccgacgcctcgggctccagctgcagcctggcccggacgcgctcccgagaaagctgcgccagcgtgcgccgcgcctcgtcggccgacgacatcgaggccatgcgcgccggggtgctgcccccgccaccgcgccacgccagcaccggggccatgcacccactgcgcagcggcttgctcaactccacctcggactccgacctcgtgcgctaccgcaccattagcaagattccccaaatcaccctcaactttgtggacctcaagggcgaccccttcttggcttcgcccaccagtgaccgtgagatcatagcacctaagataaaggagcgaacccacaatgtcactgagaaggtcacccaggtcctgtccctgggcgccgacgtgctgcctgagtacaagctgcaggcaccgcgcatccaccgctggaccatcctgcattacagccccttcaaggccgtgtgggactggctcatcctgctgctggtcatctacacggctgtcttcacaccctactcggctgccttcctgctgaaggagacggaagaaggcccgcctgctaccgagtgtggctacgcctgccagccgctggctgtggtggacctcatcgtggacatcatgttcattgtggacatcctcatcaacttccgcaccacctacgtcaatgccaacgaggaggtggtcagccaccccggccgcatcgccgtccactacttcaagggctggttcctcatcgacatggtggccgccatccccttcgacctgctcatcttcggctctggctctgaggagctgatcgggctgctgaagactgcgcggctgctgcggctggtgcgcgtggcgcggaagctggatcgctactcagagtacggcgcggccgtgctgttcttgctcatgtgcacctttgcgctcatcgcgcactggctagcctgcatctggtacgccatcggcaacatggagcagccacacatggactcacgcatcggctggctgcacaacctgggcgaccagataggcaaaccctacaacagcagcggcctgggcggcccctccatcaaggacaagtatgtgacggcgctctacttcaccttcagcagcctcaccagtgtgggcttcggcaacgtctctcccaacaccaactcagagaagatcttctccatctgcgtcatgctcattggctccctcatgtatgctagcatcttcggcaacgtgtcggccatcatccagcggctgtactcgggcacagcccgctaccacacacagatgctgcgggtgcgggagttcatccgcttccaccagatccccaatcccctgcgccagcgcctcgaggagtacttccagcacgcctggtcctacaccaacggcatcgacatgaacgcggtgctgaagggcttccctgagtgcctgcaggctgacatctgcctgcacctgaaccgctcactgctgcagcactgcaaacccttccgaggggccaccaagggctgccttcgggccctggccatgaagttcaagaccacacatgcaccgccaggggacacactggtgcatgctggggacctgctcaccgccctgtacttcatctcccggggctccatcgagatcctgcggggcgacgtcgtcgtggccatcctggggaagaatgacatctttggggagcctctgaacctgtatgcaaggcctggcaagtcgaacggggatgtgcgggccctcacctactgtgacctacacaagatccatcgggacgacctgctggaggtgctggacatgtaccctgagttctccgaccacttctggtccagcctggagatcaccttcaacctgcgagataccaacatgatcccgggctcccccggcagtacggagttagagggtggcttcagtcggcaacgcaagcgcaagttgtccttccgcaggcgcacggacaaggacacggagcagccaggggaggtgtcggccttggggccgggccgggcgggggcagggccgagtagccggggccggccgggggggccgtggggggagagcccgtccagtggcccctccagccctgagagcagtgaggatgagggcccaggccgcagctccagccccctccgcctggtgcccttctccagccccaggccccccggagagccgccgggtggggagcccctgatggaggactgcgagaagagcagcgacacttgcaaccccctgtcaggcgccttctcaggagtgtccaacattttcagcttctggggggacagtcggggccgccagtaccaggagctccctcgatgccccgcccccacccccagcctcctcaacatccccctctccagcccgggtcggcggccccggggcgacgtggagagcaggctggatgccctccagcgccagctcaacaggctggagacccggctgagtgcagacatggccactgtcctgcagctgctacagaggcagatgacgctggtcccgcccgcctacagtgctgtgaccaccccggggcctggccccacttccacatccccgctgttgcccgtcagccccctccccaccctcaccttggactcgctttctcaggtttcccagttcatggcgtgtgaggagctgcccccgggggccccagagcttccccaagaaggccccacacgacgcctctccctaccgggccagctgggggccctcacctcccagcccctgcacagacacggcttggacccgggcagttagtggggctgcccagtgtggacacgtggctcacccagggatcaaggcgctgctgggccgctccccttggaggccctgctcaggaggccctgaccgtggaaggggagaggaactcgaaagcacagctcctcccccagcccttgggaccatcttctcctgcagtcccctgggccccagtgagaggggcaggggcagggccggcagtaggtggggcctgtggtccccccactgccctgagggcattagctggtctaactgcccggaggcacccggccctgggccttaggcacctcaaggacttttctgctatttactgctcttattgttaaggataataattaaggatcatatgaataattaatgaagatgctgatgactatgaataataaataattatcctgaggaga

SEQ ID NO: 863 - DNA, 3884 bp, Homo sapiens
  source 1..3884: mol_type = genomic DNA
  misc_feature 1..3884: note = cDNA of KCNH2 gene SNP c.3467A>G (p.Asp1156Gly)
atgccggtgcggaggggccacgtcgcgccgcagaacaccttcctggacaccatcatccgcaagtttgagggccagagccgtaagttcatcatcgccaacgctcgggtggagaactgcgccgtcatctactgcaacgacggcttctgcgagctgtgcggctactcgcgggccgaggtgatgcagcgaccctgcacctgcgacttcctgcacgggccgcgcacgcagcgccgcgctgccgcgcagatcgcgcaggcactgctgggcgccgaggagcgcaaagtggaaatcgccttctaccggaaagatgggagctgcttcctatgtctggtggatgtggtgcccgtgaagaacgaggatggggctgtcatcatgttcatcctcaatttcgaggtggtgatggagaaggacatggtggggtccccggctcatgacaccaaccaccggggcccccccaccagctggctggccccaggccgcgccaagaccttccgcctgaagctgcccgcgctgctggcgctgacggcccgggagtcgtcggtgcggtcgggcggcgcgggcggcgcgggcgccccgggggccgtggtggtggacgtggacctgacgcccgcggcacccagcagcgagtcgctggccctggacgaagtgacagccatggacaaccacgtggcagggctcgggcccgcggaggagcggcgtgcgctggtgggtcccggctctccgccccgcagcgcgcccggccagctcccatcgccccgggcgcacagcctcaaccccgacgcctcgggctccagctgcagcctggcccggacgcgctcccgagaaagctgcgccagcgtgcgccgcgcctcgtcggccgacgacatcgaggccatgcgcgccggggtgctgcccccgccaccgcgccacgccagcaccggggccatgcacccactgcgcagcggcttgctcaactccacctcggactccgacctcgtgcgctaccgcaccattagcaagattccccaaatcaccctcaactttgtggacctcaagggcgaccccttcttggcttcgcccaccagtgaccgtgagatcatagcacctaagataaaggagcgaacccacaatgtcactgagaaggtcacccaggtcctgtccctgggcgccgacgtgctgcctgagtacaagctgcaggcaccgcgcatccaccgctggaccatcctgcattacagccccttcaaggccgtgtgggactggctcatcctgctgctggtcatctacacggctgtcttcacaccctactcggctgccttcctgctgaaggagacggaagaaggcccgcctgctaccgagtgtggctacgcctgccagccgctggctgtggtggacctcatcgtggacatcatgttcattgtggacatcctcatcaacttccgcaccacctacgtcaatgccaacgaggaggtggtcagccaccccggccgcatcgccgtccactacttcaagggctggttcctcatcgacatggtggccgccatccccttcgacctgctcatcttcggctctggctctgaggagctgatcgggctgctgaagactgcgcggctgctgcggctggtgcgcgtggcgcggaagctggatcgctactcagagtacggcgcggccgtgctgttcttgctcatgtgcacctttgcgctcatcgcgcactggctagcctgcatctggtacgccatcggcaacatggagcagccacacatggactcacgcatcggctggctgcacaacctgggcgaccagataggcaaaccctacaacagcagcggcctgggcggcccctccatcaaggacaagtatgtgacggcgctctacttcaccttcagcagcctcaccagtgtgggcttcggcaacgtctctcccaacaccaactcagagaagatcttctccatctgcgtcatgctcattggctccctcatgtatgctagcatcttcggcaacgtgtcggccatcatccagcggctgtactcgggcacagcccgctaccacacacagatgctgcgggtgcgggagttcatccgcttccaccagatccccaatcccctgcgccagcgcctcgaggagtacttccagcacgcctggtcctacaccaacggcatcgacatgaacgcggtgctgaagggcttccctgagtgcctgcaggctgacatctgcctgcacctgaaccgctcactgctgcagcactgcaaacccttccgaggggccaccaagggctgccttcgggccctggccatgaagttcaagaccacacatgcaccgccaggggacacactggtgcatgctggggacctgctcaccgccctgtacttcatctcccggggctccatcgagatcctgcggggcgacgtcgtcgtggccatcctggggaagaatgacatctttggggagcctctgaacctgtatgcaaggcctggcaagtcgaacggggatgtgcgggccctcacctactgtgacctacacaagatccatcgggacgacctgctggaggtgctggacatgtaccctgagttctccgaccacttctggtccagcctggagatcaccttcaacctgcgagataccaacatgatcccgggctcccccggcagtacggagttagagggtggcttcagtcggcaacgcaagcgcaagttgtccttccgcaggcgcacggacaaggacacggagcagccaggggaggtgtcggccttggggccgggccgggcgggggcagggccgagtagccggggccggccgggggggccgtggggggagagcccgtccagtggcccctccagccctgagagcagtgaggatgagggcccaggccgcagctccagccccctccgcctggtgcccttctccagccccaggccccccggagagccgccgggtggggagcccctgatggaggactgcgagaagagcagcgacacttgcaaccccctgtcaggcgccttctcaggagtgtccaacattttcagcttctggggggacagtcggggccgccagtaccaggagctccctcgatgccccgcccccacccccagcctcctcaacatccccctctccagcccgggtcggcggccccggggcgacgtggagagcaggctggatgccctccagcgccagctcaacaggctggagacccggctgagtgcagacatggccactgtcctgcagctgctacagaggcagatgacgctggtcccgcccgcctacagtgctgtgaccaccccggggcctggccccacttccacatccccgctgttgcccgtcagccccctccccaccctcaccttggactcgctttctcaggtttcccagttcatggcgtgtgaggagctgcccccgggggccccagagcttccccaagaaggccccacacgacgcctctccctaccgggccagctgggggccctcacctcccagcccctgcacagacacggctcgggcccgggcagttagtggggctgcccagtgtggacacgtggctcacccagggatcaaggcgctgctgggccgctccccttggaggccctgctcaggaggccctgaccgtggaaggggagaggaactcgaaagcacagctcctcccccagcccttgggaccatcttctcctgcagtcccctgggccccagtgagaggggcaggggcagggccggcagtaggtggggcctgtggtccccccactgccctgagggcattagctggtctaactgcccggaggcacccggccctgggccttaggcacctcaaggacttttctgctatttactgctcttattgttaaggataataattaaggatcatatgaataattaatgaagatgctgatgactatgaataataaataattatcctgaggaga

SEQ ID NO: 864 - DNA, 3884 bp, Homo sapiens
  source 1..3884: mol_type = genomic DNA
  misc_feature 1..3884: note = cDNA of KCNH2 gene SNP c.3469C>T (p.Pro1157Ser)
atgccggtgcggaggggccacgtcgcgccgcagaacaccttcctggacaccatcatccgcaagtttgagggccagagccgtaagttcatcatcgccaacgctcgggtggagaactgcgccgtcatctactgcaacgacggcttctgcgagctgtgcggctactcgcgggccgaggtgatgcagcgaccctgcacctgcgacttcctgcacgggccgcgcacgcagcgccgcgctgccgcgcagatcgcgcaggcactgctgggcgccgaggagcgcaaagtggaaatcgccttctaccggaaagatgggagctgcttcctatgtctggtggatgtggtgcccgtgaagaacgaggatggggctgtcatcatgttcatcctcaatttcgaggtggtgatggagaaggacatggtggggtccccggctcatgacaccaaccaccggggcccccccaccagctggctggccccaggccgcgccaagaccttccgcctgaagctgcccgcgctgctggcgctgacggcccgggagtcgtcggtgcggtcgggcggcgcgggcggcgcgggcgccccgggggccgtggtggtggacgtggacctgacgcccgcggcacccagcagcgagtcgctggccctggacgaagtgacagccatggacaaccacgtggcagggctcgggcccgcggaggagcggcgtgcgctggtgggtcccggctctccgccccgcagcgcgcccggccagctcccatcgccccgggcgcacagcctcaaccccgacgcctcgggctccagctgcagcctggcccggacgcgctcccgagaaagctgcgccagcgtgcgccgcgcctcgtcggccgacgacatcgaggccatgcgcgccggggtgctgcccccgccaccgcgccacgccagcaccggggccatgcacccactgcgcagcggcttgctcaactccacctcggactccgacctcgtgcgctaccgcaccattagcaagattccccaaatcaccctcaactttgtggacctcaagggcgaccccttcttggcttcgcccaccagtgaccgtgagatcatagcacctaagataaaggagcgaacccacaatgtcactgagaaggtcacccaggtcctgtccctgggcgccgacgtgctgcctgagtacaagctgcaggcaccgcgcatccaccgctggaccatcctgcattacagccccttcaaggccgtgtgggactggctcatcctgctgctggtcatctacacggctgtcttcacaccctactcggctgccttcctgctgaaggagacggaagaaggcccgcctgctaccgagtgtggctacgcctgccagccgctggctgtggtggacctcatcgtggacatcatgttcattgtggacatcctcatcaacttccgcaccacctacgtcaatgccaacgaggaggtggtcagccaccccggccgcatcgccgtccactacttcaagggctggttcctcatcgacatggtggccgccatccccttcgacctgctcatcttcggctctggctctgaggagctgatcgggctgctgaagactgcgcggctgctgcggctggtgcgcgtggcgcggaagctggatcgctactcagagtacggcgcggccgtgctgttcttgctcatgtgcacctttgcgctcatcgcgcactggctagcctgcatctggtacgccatcggcaacatggagcagccacacatggactcacgcatcggctggctgcacaacctgggcgaccagataggcaaaccctacaacagcagcggcctgggcggcccctccatcaaggacaagtatgtgacggcgctctacttcaccttcagcagcctcaccagtgtgggcttcggcaacgtctctcccaacaccaactcagagaagatcttctccatctgcgtcatgctcattggctccctcatgtatgctagcatcttcggcaacgtgtcggccatcatccagcggctgtactcgggcacagcccgctaccacacacagatgctgcgggtgcgggagttcatccgcttccaccagatccccaatcccctgcgccagcgcctcgaggagtacttccagcacgcctggtcctacaccaacggcatcgacatgaacgcggtgctgaagggcttccctgagtgcctgcaggctgacatctgcctgcacctgaaccgctcactgctgcagcactgcaaacccttccgaggggccaccaagggctgccttcgggccctggccatgaagttcaagaccacacatgcaccgccaggggacacactggtgcatgctggggacctgctcaccgccctgtacttcatctcccggggctccatcgagatcctgcggggcgacgtcgtcgtggccatcctggggaagaatgacatctttggggagcctctgaacctgtatgcaaggcctggcaagtcgaacggggatgtgcgggccctcacctactgtgacctacacaagatccatcgggacgacctgctggaggtgctggacatgtaccctgagttctccgaccacttctggtccagcctggagatcaccttcaacctgcgagataccaacatgatcccgggctcccccggcagtacggagttagagggtggcttcagtcggcaacgcaagcgcaagttgtccttccgcaggcgcacggacaaggacacggagcagccaggggaggtgtcggccttggggccgggccgggcgggggcagggccgagtagccggggccggccgggggggccgtggggggagagcccgtccagtggcccctccagccctgagagcagtgaggatgagggcccaggccgcagctccagccccctccgcctggtgcccttctccagccccaggccccccggagagccgccgggtggggagcccctgatggaggactgcgagaagagcagcgacacttgcaaccccctgtcaggcgccttctcaggagtgtccaacattttcagcttctggggggacagtcggggccgccagtaccaggagctccctcgatgccccgcccccacccccagcctcctcaacatccccctctccagcccgggtcggcggccccggggcgacgtggagagcaggctggatgccctccagcgccagctcaacaggctggagacccggctgagtgcagacatggccactgtcctgcagctgctacagaggcagatgacgctggtcccgcccgcctacagtgctgtgaccaccccggggcctggccccacttccacatccccgctgttgcccgtcagccccctccccaccctcaccttggactcgctttctcaggtttcccagttcatggcgtgtgaggagctgcccccgggggccccagagcttccccaagaaggccccacacgacgcctctccctaccgggccagctgggggccctcacctcccagcccctgcacagacacggctcggactcgggcagttagtggggctgcccagtgtggacacgtggctcacccagggatcaaggcgctgctgggccgctccccttggaggccctgctcaggaggccctgaccgtggaaggggagaggaactcgaaagcacagctcctcccccagcccttgggaccatcttctcctgcagtcccctgggccccagtgagaggggcaggggcagggccggcagtaggtggggcctgtggtccccccactgccctgagggcattagctggtctaactgcccggaggcacccggccctgggccttaggcacctcaaggacttttctgctatttactgctcttattgttaaggataataattaaggatcatatgaataattaatgaagatgctgatgactatgaataataaataattatcctgaggaga

SEQ ID NO: 865 - DNA, 3884 bp, Homo sapiens
  source 1..3884: mol_type = genomic DNA
  misc_feature 1..3884: note = cDNA of KCNH2 gene SNP c.3470C>T (p.Pro1157Leu)
atgccggtgcggaggggccacgtcgcgccgcagaacaccttcctggacaccatcatccgcaagtttgagggccagagccgtaagttcatcatcgccaacgctcgggtggagaactgcgccgtcatctactgcaacgacggcttctgcgagctgtgcggctactcgcgggccgaggtgatgcagcgaccctgcacctgcgacttcctgcacgggccgcgcacgcagcgccgcgctgccgcgcagatcgcgcaggcactgctgggcgccgaggagcgcaaagtggaaatcgccttctaccggaaagatgggagctgcttcctatgtctggtggatgtggtgcccgtgaagaacgaggatggggctgtcatcatgttcatcctcaatttcgaggtggtgatggagaaggacatggtggggtccccggctcatgacaccaaccaccggggcccccccaccagctggctggccccaggccgcgccaagaccttccgcctgaagctgcccgcgctgctggcgctgacggcccgggagtcgtcggtgcggtcgggcggcgcgggcggcgcgggcgccccgggggccgtggtggtggacgtggacctgacgcccgcggcacccagcagcgagtcgctggccctggacgaagtgacagccatggacaaccacgtggcagggctcgggcccgcggaggagcggcgtgcgctggtgggtcccggctctccgccccgcagcgcgcccggccagctcccatcgccccgggcgcacagcctcaaccccgacgcctcgggctccagctgcagcctggcccggacgcgctcccgagaaagctgcgccagcgtgcgccgcgcctcgtcggccgacgacatcgaggccatgcgcgccggggtgctgcccccgccaccgcgccacgccagcaccggggccatgcacccactgcgcagcggcttgctcaactccacctcggactccgacctcgtgcgctaccgcaccattagcaagattccccaaatcaccctcaactttgtggacctcaagggcgaccccttcttggcttcgcccaccagtgaccgtgagatcatagcacctaagataaaggagcgaacccacaatgtcactgagaaggtcacccaggtcctgtccctgggcgccgacgtgctgcctgagtacaagctgcaggcaccgcgcatccaccgctggaccatcctgcattacagccccttcaaggccgtgtgggactggctcatcctgctgctggtcatctacacggctgtcttcacaccctactcggctgccttcctgctgaaggagacggaagaaggcccgcctgctaccgagtgtggctacgcctgccagccgctggctgtggtggacctcatcgtggacatcatgttcattgtggacatcctcatcaacttccgcaccacctacgtcaatgccaacgaggaggtggtcagccaccccggccgcatcgccgtccactacttcaagggctggttcctcatcgacatggtggccgccatccccttcgacctgctcatcttcggctctggctctgaggagctgatcgggctgctgaagactgcgcggctgctgcggctggtgcgcgtggcgcggaagctggatcgctactcagagtacggcgcggccgtgctgttcttgctcatgtgcacctttgcgctcatcgcgcactggctagcctgcatctggtacgccatcggcaacatggagcagccacacatggactcacgcatcggctggctgcacaacctgggcgaccagataggcaaaccctacaacagcagcggcctgggcggcccctccatcaaggacaagtatgtgacggcgctctacttcaccttcagcagcctcaccagtgtgggcttcggcaacgtctctcccaacaccaactcagagaagatcttctccatctgcgtcatgctcattggctccctcatgtatgctagcatcttcggcaacgtgtcggccatcatccagcggctgtactcgggcacagcccgctaccacacacagatgctgcgggtgcgggagttcatccgcttccaccagatccccaatcccctgcgccagcgcctcgaggagtacttccagcacgcctggtcctacaccaacggcatcgacatgaacgcggtgctgaagggcttccctgagtgcctgcaggctgacatctgcctgcacctgaaccgctcactgctgcagcactgcaaacccttccgaggggccaccaagggctgccttcgggccctggccatgaagttcaagaccacacatgcaccgccaggggacacactggtgcatgctggggacctgctcaccgccctgtacttcatctcccggggctccatcgagatcctgcggggcgacgtcgtcgtggccatcctggggaagaatgacatctttggggagcctctgaacctgtatgcaaggcctggcaagtcgaacggggatgtgcgggccctcacctactgtgacctacacaagatccatcgggacgacctgctggaggtgctggacatgtaccctgagttctccgaccacttctggtccagcctggagatcaccttcaacctgcgagataccaacatgatcccgggctcccccggcagtacggagttagagggtggcttcagtcggcaacgcaagcgcaagttgtccttccgcaggcgcacggacaaggacacggagcagccaggggaggtgtcggccttggggccgggccgggcgggggcagggccgagtagccggggccggccgggggggccgtggggggagagcccgtccagtggcccctccagccctgagagcagtgaggatgagggcccaggccgcagctccagccccctccgcctggtgcccttctccagccccaggccccccggagagccgccgggtggggagcccctgatggaggactgcgagaagagcagcgacacttgcaaccccctgtcaggcgccttctcaggagtgtccaacattttcagcttctggggggacagtcggggccgccagtaccaggagctccctcgatgccccgcccccacccccagcctcctcaacatccccctctccagcccgggtcggcggccccggggcgacgtggagagcaggctggatgccctccagcgccagctcaacaggctggagacccggctgagtgcagacatggccactgtcctgcagctgctacagaggcagatgacgctggtcccgcccgcctacagtgctgtgaccaccccggggcctggccccacttccacatccccgctgttgcccgtcagccccctccccaccctcaccttggactcgctttctcaggtttcccagttcatggcgtgtgaggagctgcccccgggggccccagagcttccccaagaaggccccacacgacgcctctccctaccgggccagctgggggccctcacctcccagcccctgcacagacacggctcggacctgggcagttagtggggctgcccagtgtggacacgtggctcacccagggatcaaggcgctgctgggccgctccccttggaggccctgctcaggaggccctgaccgtggaaggggagaggaactcgaaagcacagctcctcccccagcccttgggaccatcttctcctgcagtcccctgggccccagtgagaggggcaggggcagggccggcagtaggtggggcctgtggtccccccactgccctgagggcattagctggtctaactgcccggaggcacccggccctgggccttaggcacctcaaggacttttctgctatttactgctcttattgttaaggataataattaaggatcatatgaataattaatgaagatgctgatgactatgaataataaataattatcctgaggaga

SEQ ID NO: 866 - DNA, 3884 bp, Homo sapiens
  source 1..3884: mol_type = genomic DNA
  misc_feature 1..3884
atgccggtgcggaggggccacgtcgcgccgcagaacaccttcctggacaccatcatccgcaagtttgagggccagagccgtaagttcatcatcgccaacgctcgggtggagaactgcgccgtcatctactgcaacgacggcttctgcgagctgtgcggctactcgcgggccgaggtgatgcagcgaccctgcacctgcgacttcctgcacgggccgcgcacgcagcgccgcgctgccgcgcagatcgcgcaggcactgctgggcgccgaggagcgcaaagtggaaatcgccttctaccggaaagatgggagctgcttcctatgtctggtggatgtggtgcccgtgaagaacgaggatggggctgtcatcatgttcatcctcaatttcgaggtggtgatggagaaggacatggtggggtccccggctcatgacaccaaccaccggggcccccccaccagctggctggccccaggccgcgccaagaccttccgcctgaagctgcccgcgctgctggcgctgacggcccgggagtcgtcggtgcggtcgggcggcgcgggcggcgcgggcgccccgggggccgtggtggtggacgtggacctgacgcccgcggcacccagcagcgagtcgctggccctggacgaagtgacagccatggacaaccacgtggcagggctcgggcccgcggaggagcggcgtgcgctggtgggtcccggctctccgccccgcagcgcgcccggccagctcccatcgccccgggcgcacagcctcaaccccgacgcctcgggctccagctgcagcctggcccggacgcgctcccgagaaagctgcgccagcgtgcgccgcgcctcgtcggccgacgacatcgaggccatgcgcgccggggtgctgcccccgccaccgcgccacgccagcaccggggccatgcacccactgcgcagcggcttgctcaactccacctcggactccgacctcgtgcgctaccgcaccattagcaagattccccaaatcaccctcaactttgtggacctcaagggcgaccccttcttggcttcgcccaccagtgaccgtgagatcatagcacctaagataaaggagcgaacccacaatgtcactgagaaggtcacccaggtcctgtccctgggcgccgacgtgctgcctgagtacaagctgcaggcaccgcgcatccaccgctggaccatcctgcattacagccccttcaaggccgtgtgggactggctcatcctgctgctggtcatctacacggctgtcttcacaccctactcggctgccttcctgctgaaggagacggaagaaggcccgcctgctaccgagtgtggctacgcctgccagccgctggctgtggtggacctcatcgtggacatcatgttcattgtggacatcctcatcaacttccgcaccacctacgtcaatgccaacgaggaggtggtcagccaccccggccgcatcgccgtccactacttcaagggctggttcctcatcgacatggtggccgccatccccttcgacctgctcatcttcggctctggctctgaggagctgatcgggctgctgaagactgcgcggctgctgcggctggtgcgcgtggcgcggaagctggatcgctactcagagtacggcgcggccgtgctgttcttgctcatgtgcacctttgcgctcatcgcgcactggctagcctgcatctggtacgccatcggcaacatggagcagccacacatggactcacgcatcggctggctgcacaacctgggcgaccagataggcaaaccctacaacagcagcggcctgggcggcccctccatcaaggacaagtatgtgacggcgctctacttcaccttcagcagcctcaccagtgtgggcttcggcaacgtctctcccaacaccaactcagagaagatcttctccatctgcgtcatgctcattggctccctcatgtatgctagcatcttcggcaacgtgtcggccatcatccagcggctgtactcgggcacagcccgctaccacacacagatgctgcgggtgcgggagttcatccgcttccaccagatccccaatcccctgcgccagcgcctcgaggagtacttccagcacgcctggtcctacaccaacggcatcgacatgaacgcggtgctgaagggcttccctgagtgcctgcaggctgacatctgcctgcacctgaaccgctcactgctgcagcactgcaaacccttccgaggggccaccaagggctgccttcgggccctggccatgaagttcaagaccacacatgcaccgccaggggacacactggtgcatgctggggacctgctcaccgccctgtacttcatctcccggggctccatcgagatcctgcggggcgacgtcgtcgtggccatcctggggaagaatgacatctttggggagcctctgaacctgtatgcaaggcctggcaagtcgaacggggatgtgcgggccctcacctactgtgacctacacaagatccatcgggacgacctgctggaggtgctggacatgtaccctgagttctccgaccacttctggtccagcctggagatcaccttcaacctgcgagataccaacatgatcccgggctcccccggcagtacggagttagagggtggcttcagtcggcaacgcaagcgcaagttgtccttccgcaggcgcacggacaaggacacggagcagccaggggaggtgtcggccttggggccgggccgggcgggggcagggccgagtagccggggccggccgggggggccgtggggggagagcccgtccagtggcccctccagccctgagagcagtgaggatgagggcccaggccgcagctccagccccctccgcctggtgcccttctccagccccaggccccccggagagccgccgggtggggagcccctgatggaggactgcgagaagagcagcgacacttgcaaccccctgtcaggcgccttctcaggagtgtccaacattttcagcttctggggggacagtcggggccgccagtaccaggagctccctcgatgccccgcccccacccccagcctcctcaacatccccctctccagcccgggtcggcggccccggggcgacgtggagagcaggctggatgccctccagcgccagctcaacaggctggagacccggctgagtgcagacatggccactgtcctgcagctgctacagaggcagatgacgctggtcccgcccgcctacagtgctgtgaccaccccggggcctggccccacttccacatccccgctgttgcccgtcagccccctccccaccctcaccttggactcgctttctcaggtttcccagttcatggcgtgtgaggagctgcccccgggggccccagagcttccccaagaaggccccacacgacgcctctccctaccgggccagctgggggccctcacctcccagcccctgcacagacacggctcggacccggccagttagtggggctgcccagtgtggacacgtggctcacccagggatcaaggcgctgctgggccgctccccttggaggccctgctcaggaggccctgaccgtggaaggggagaggaactcgaaagcacagctcctcccccagcccttgggaccatcttctcctgcagtcccctgggccccagtgagaggggcaggggcagggccggcagtaggtggggcctgtggtccccccactgccctgagggcattagctggtctaactgcccggaggcacccggccctgggccttaggcacctcaaggacttttctgctatttactgctcttattgttaaggataataattaaggatcatatgaataattaatgaagatgctgatgactatgaataataaataattatcctgaggaga

SEQ ID NO: 867 - DNA, 3884 bp, Homo sapiens
  source 1..3884: mol_type = genomic DNA
  misc_feature 1..3884: note = cDNA of KCNH2 gene SNP c.352G>A (p.Glu118Lys)
atgccggtgcggaggggccacgtcgcgccgcagaacaccttcctggacaccatcatccgcaagtttgagggccagagccgtaagttcatcatcgccaacgctcgggtggagaactgcgccgtcatctactgcaacgacggcttctgcgagctgtgcggctactcgcgggccgaggtgatgcagcgaccctgcacctgcgacttcctgcacgggccgcgcacgcagcgccgcgctgccgcgcagatcgcgcaggcactgctgggcgccgaggagcgcaaagtggaaatcgccttctaccggaaagatgggagctgcttcctatgtctggtggatgtggtgcccgtgaagaacaaggatggggctgtcatcatgttcatcctcaatttcgaggtggtgatggagaaggacatggtggggtccccggctcatgacaccaaccaccggggcccccccaccagctggctggccccaggccgcgccaagaccttccgcctgaagctgcccgcgctgctggcgctgacggcccgggagtcgtcggtgcggtcgggcggcgcgggcggcgcgggcgccccgggggccgtggtggtggacgtggacctgacgcccgcggcacccagcagcgagtcgctggccctggacgaagtgacagccatggacaaccacgtggcagggctcgggcccgcggaggagcggcgtgcgctggtgggtcccggctctccgccccgcagcgcgcccggccagctcccatcgccccgggcgcacagcctcaaccccgacgcctcgggctccagctgcagcctggcccggacgcgctcccgagaaagctgcgccagcgtgcgccgcgcctcgtcggccgacgacatcgaggccatgcgcgccggggtgctgcccccgccaccgcgccacgccagcaccggggccatgcacccactgcgcagcggcttgctcaactccacctcggactccgacctcgtgcgctaccgcaccattagcaagattccccaaatcaccctcaactttgtggacctcaagggcgaccccttcttggcttcgcccaccagtgaccgtgagatcatagcacctaagataaaggagcgaacccacaatgtcactgagaaggtcacccaggtcctgtccctgggcgccgacgtgctgcctgagtacaagctgcaggcaccgcgcatccaccgctggaccatcctgcattacagccccttcaaggccgtgtgggactggctcatcctgctgctggtcatctacacggctgtcttcacaccctactcggctgccttcctgctgaaggagacggaagaaggcccgcctgctaccgagtgtggctacgcctgccagccgctggctgtggtggacctcatcgtggacatcatgttcattgtggacatcctcatcaacttccgcaccacctacgtcaatgccaacgaggaggtggtcagccaccccggccgcatcgccgtccactacttcaagggctggttcctcatcgacatggtggccgccatccccttcgacctgctcatcttcggctctggctctgaggagctgatcgggctgctgaagactgcgcggctgctgcggctggtgcgcgtggcgcggaagctggatcgctactcagagtacggcgcggccgtgctgttcttgctcatgtgcacctttgcgctcatcgcgcactggctagcctgcatctggtacgccatcggcaacatggagcagccacacatggactcacgcatcggctggctgcacaacctgggcgaccagataggcaaaccctacaacagcagcggcctgggcggcccctccatcaaggacaagtatgtgacggcgctctacttcaccttcagcagcctcaccagtgtgggcttcggcaacgtctctcccaacaccaactcagagaagatcttctccatctgcgtcatgctcattggctccctcatgtatgctagcatcttcggcaacgtgtcggccatcatccagcggctgtactcgggcacagcccgctaccacacacagatgctgcgggtgcgggagttcatccgcttccaccagatccccaatcccctgcgccagcgcctcgaggagtacttccagcacgcctggtcctacaccaacggcatcgacatgaacgcggtgctgaagggcttccctgagtgcctgcaggctgacatctgcctgcacctgaaccgctcactgctgcagcactgcaaacccttccgaggggccaccaagggctgccttcgggccctggccatgaagttcaagaccacacatgcaccgccaggggacacactggtgcatgctggggacctgctcaccgccctgtacttcatctcccggggctccatcgagatcctgcggggcgacgtcgtcgtggccatcctggggaagaatgacatctttggggagcctctgaacctgtatgcaaggcctggcaagtcgaacggggatgtgcgggccctcacctactgtgacctacacaagatccatcgggacgacctgctggaggtgctggacatgtaccctgagttctccgaccacttctggtccagcctggagatcaccttcaacctgcgagataccaacatgatcccgggctcccccggcagtacggagttagagggtggcttcagtcggcaacgcaagcgcaagttgtccttccgcaggcgcacggacaaggacacggagcagccaggggaggtgtcggccttggggccgggccgggcgggggcagggccgagtagccggggccggccgggggggccgtggggggagagcccgtccagtggcccctccagccctgagagcagtgaggatgagggcccaggccgcagctccagccccctccgcctggtgcccttctccagccccaggccccccggagagccgccgggtggggagcccctgatggaggactgcgagaagagcagcgacacttgcaaccccctgtcaggcgccttctcaggagtgtccaacattttcagcttctggggggacagtcggggccgccagtaccaggagctccctcgatgccccgcccccacccccagcctcctcaacatccccctctccagcccgggtcggcggccccggggcgacgtggagagcaggctggatgccctccagcgccagctcaacaggctggagacccggctgagtgcagacatggccactgtcctgcagctgctacagaggcagatgacgctggtcccgcccgcctacagtgctgtgaccaccccggggcctggccccacttccacatccccgctgttgcccgtcagccccctccccaccctcaccttggactcgctttctcaggtttcccagttcatggcgtgtgaggagctgcccccgggggccccagagcttccccaagaaggccccacacgacgcctctccctaccgggccagctgggggccctcacctcccagcccctgcacagacacggctcggacccgggcagttagtggggctgcccagtgtggacacgtggctcacccagggatcaaggcgctgctgggccgctccccttggaggccctgctcaggaggccctgaccgtggaaggggagaggaactcgaaagcacagctcctcccccagcccttgggaccatcttctcctgcagtcccctgggccccagtgagaggggcaggggcagggccggcagtaggtggggcctgtggtccccccactgccctgagggcattagctggtctaactgcccggaggcacccggccctgggccttaggcacctcaaggacttttctgctatttactgctcttattgttaaggataataattaaggatcatatgaataattaatgaagatgctgatgactatgaataataaataattatcctgaggaga

SEQ ID NO: 868 - DNA, 3884 bp, Homo sapiens
  source 1..3884: mol_type = genomic DNA
  misc_feature 1..3884
atgccggtgcggaggggccacgtcgcgccgcagaacaccttcctggacaccatcatccgcaagtttgagggccagagccgtaagttcatcatcgccaacgctcgggtggagaactgcgccgtcatctactgcaacgacggcttctgcgagctgtgcggctactcgcgggccgaggtgatgcagcgaccctgcacctgcgacttcctgcacgggccgcgcacgcagcgccgcgctgccgcgcagatcgcgcaggcactgctgggcgccgaggagcgcaaagtggaaatcgccttctaccggaaagatgggagctgcttcctatgtctggtggatgtggtgcccgtgaagaaccaggatggggctgtcatcatgttcatcctcaatttcgaggtggtgatggagaaggacatggtggggtccccggctcatgacaccaaccaccggggcccccccaccagctggctggccccaggccgcgccaagaccttccgcctgaagctgcccgcgctgctggcgctgacggcccgggagtcgtcggtgcggtcgggcggcgcgggcggcgcgggcgccccgggggccgtggtggtggacgtggacctgacgcccgcggcacccagcagcgagtcgctggccctggacgaagtgacagccatggacaaccacgtggcagggctcgggcccgcggaggagcggcgtgcgctggtgggtcccggctctccgccccgcagcgcgcccggccagctcccatcgccccgggcgcacagcctcaaccccgacgcctcgggctccagctgcagcctggcccggacgcgctcccgagaaagctgcgccagcgtgcgccgcgcctcgtcggccgacgacatcgaggccatgcgcgccggggtgctgcccccgccaccgcgccacgccagcaccggggccatgcacccactgcgcagcggcttgctcaactccacctcggactccgacctcgtgcgctaccgcaccattagcaagattccccaaatcaccctcaactttgtggacctcaagggcgaccccttcttggcttcgcccaccagtgaccgtgagatcatagcacctaagataaaggagcgaacccacaatgtcactgagaaggtcacccaggtcctgtccctgggcgccgacgtgctgcctgagtacaagctgcaggcaccgcgcatccaccgctggaccatcctgcattacagccccttcaaggccgtgtgggactggctcatcctgctgctggtcatctacacggctgtcttcacaccctactcggctgccttcctgctgaaggagacggaagaaggcccgcctgctaccgagtgtggctacgcctgccagccgctggctgtggtggacctcatcgtggacatcatgttcattgtggacatcctcatcaacttccgcaccacctacgtcaatgccaacgaggaggtggtcagccaccccggccgcatcgccgtccactacttcaagggctggttcctcatcgacatggtggccgccatccccttcgacctgctcatcttcggctctggctctgaggagctgatcgggctgctgaagactgcgcggctgctgcggctggtgcgcgtggcgcggaagctggatcgctactcagagtacggcgcggccgtgctgttcttgctcatgtgcacctttgcgctcatcgcgcactggctagcctgcatctggtacgccatcggcaacatggagcagccacacatggactcacgcatcggctggctgcacaacctgggcgaccagataggcaaaccctacaacagcagcggcctgggcggcccctccatcaaggacaagtatgtgacggcgctctacttcaccttcagcagcctcaccagtgtgggcttcggcaacgtctctcccaacaccaactcagagaagatcttctccatctgcgtcatgctcattggctccctcatgtatgctagcatcttcggcaacgtgtcggccatcatccagcggctgtactcgggcacagcccgctaccacacacagatgctgcgggtgcgggagttcatccgcttccaccagatccccaatcccctgcgccagcgcctcgaggagtacttccagcacgcctggtcctacaccaacggcatcgacatgaacgcggtgctgaagggcttccctgagtgcctgcaggctgacatctgcctgcacctgaaccgctcactgctgcagcactgcaaacccttccgaggggccaccaagggctgccttcgggccctggccatgaagttcaagaccacacatgcaccgccaggggacacactggtgcatgctggggacctgctcaccgccctgtacttcatctcccggggctccatcgagatcctgcggggcgacgtcgtcgtggccatcctggggaagaatgacatctttggggagcctctgaacctgtatgcaaggcctggcaagtcgaacggggatgtgcgggccctcacctactgtgacctacacaagatccatcgggacgacctgctggaggtgctggacatgtaccctgagttctccgaccacttctggtccagcctggagatcaccttcaacctgcgagataccaacatgatcccgggctcccccggcagtacggagttagagggtggcttcagtcggcaacgcaagcgcaagttgtccttccgcaggcgcacggacaaggacacggagcagccaggggaggtgtcggccttggggccgggccgggcgggggcagggccgagtagccggggccggccgggggggccgtggggggagagcccgtccagtggcccctccagccctgagagcagtgaggatgagggcccaggccgcagctccagccccctccgcctggtgcccttctccagccccaggccccccggagagccgccgggtggggagcccctgatggaggactgcgagaagagcagcgacacttgcaaccccctgtcaggcgccttctcaggagtgtccaacattttcagcttctggggggacagtcggggccgccagtaccaggagctccctcgatgccccgcccccacccccagcctcctcaacatccccctctccagcccgggtcggcggccccggggcgacgtggagagcaggctggatgccctccagcgccagctcaacaggctggagacccggctgagtgcagacatggccactgtcctgcagctgctacagaggcagatgacgctggtcccgcccgcctacagtgctgtgaccaccccggggcctggccccacttccacatccccgctgttgcccgtcagccccctccccaccctcaccttggactcgctttctcaggtttcccagttcatggcgtgtgaggagctgcccccgggggccccagagcttccccaagaaggccccacacgacgcctctccctaccgggccagctgggggccctcacctcccagcccctgcacagacacggctcggacccgggcagttagtggggctgcccagtgtggacacgtggctcacccagggatcaaggcgctgctgggccgctccccttggaggccctgctcaggaggccctgaccgtggaaggggagaggaactcgaaagcacagctcctcccccagcccttgggaccatcttctcctgcagtcccctgggccccagtgagaggggcaggggcagggccggcagtaggtggggcctgtggtccccccactgccctgagggcattagctggtctaactgcccggaggcacccggccctgggccttaggcacctcaaggacttttctgctatttactgctcttattgttaaggataataattaaggatcatatgaataattaatgaagatgctgatgactatgaataataaataattatcctgaggaga

SEQ ID NO: 869 - DNA, 3884 bp, Homo sapiens
  source 1..3884: mol_type = genomic DNA
  misc_feature 1..3884: note = cDNA of KCNH2 gene SNP c.355G>C (p.Asp119His)
atgccggtgcggaggggccacgtcgcgccgcagaacaccttcctggacaccatcatccgcaagtttgagggccagagccgtaagttcatcatcgccaacgctcgggtggagaactgcgccgtcatctactgcaacgacggcttctgcgagctgtgcggctactcgcgggccgaggtgatgcagcgaccctgcacctgcgacttcctgcacgggccgcgcacgcagcgccgcgctgccgcgcagatcgcgcaggcactgctgggcgccgaggagcgcaaagtggaaatcgccttctaccggaaagatgggagctgcttcctatgtctggtggatgtggtgcccgtgaagaacgagcatggggctgtcatcatgttcatcctcaatttcgaggtggtgatggagaaggacatggtggggtccccggctcatgacaccaaccaccggggcccccccaccagctggctggccccaggccgcgccaagaccttccgcctgaagctgcccgcgctgctggcgctgacggcccgggagtcgtcggtgcggtcgggcggcgcgggcggcgcgggcgccccgggggccgtggtggtggacgtggacctgacgcccgcggcacccagcagcgagtcgctggccctggacgaagtgacagccatggacaaccacgtggcagggctcgggcccgcggaggagcggcgtgcgctggtgggtcccggctctccgccccgcagcgcgcccggccagctcccatcgccccgggcgcacagcctcaaccccgacgcctcgggctccagctgcagcctggcccggacgcgctcccgagaaagctgcgccagcgtgcgccgcgcctcgtcggccgacgacatcgaggccatgcgcgccggggtgctgcccccgccaccgcgccacgccagcaccggggccatgcacccactgcgcagcggcttgctcaactccacctcggactccgacctcgtgcgctaccgcaccattagcaagattccccaaatcaccctcaactttgtggacctcaagggcgaccccttcttggcttcgcccaccagtgaccgtgagatcatagcacctaagataaaggagcgaacccacaatgtcactgagaaggtcacccaggtcctgtccctgggcgccgacgtgctgcctgagtacaagctgcaggcaccgcgcatccaccgctggaccatcctgcattacagccccttcaaggccgtgtgggactggctcatcctgctgctggtcatctacacggctgtcttcacaccctactcggctgccttcctgctgaaggagacggaagaaggcccgcctgctaccgagtgtggctacgcctgccagccgctggctgtggtggacctcatcgtggacatcatgttcattgtggacatcctcatcaacttccgcaccacctacgtcaatgccaacgaggaggtggtcagccaccccggccgcatcgccgtccactacttcaagggctggttcctcatcgacatggtggccgccatccccttcgacctgctcatcttcggctctggctctgaggagctgatcgggctgctgaagactgcgcggctgctgcggctggtgcgcgtggcgcggaagctggatcgctactcagagtacggcgcggccgtgctgttcttgctcatgtgcacctttgcgctcatcgcgcactggctagcctgcatctggtacgccatcggcaacatggagcagccacacatggactcacgcatcggctggctgcacaacctgggcgaccagataggcaaaccctacaacagcagcggcctgggcggcccctccatcaaggacaagtatgtgacggcgctctacttcaccttcagcagcctcaccagtgtgggcttcggcaacgtctctcccaacaccaactcagagaagatcttctccatctgcgtcatgctcattggctccctcatgtatgctagcatcttcggcaacgtgtcggccatcatccagcggctgtactcgggcacagcccgctaccacacacagatgctgcgggtgcgggagttcatccgcttccaccagatccccaatcccctgcgccagcgcctcgaggagtacttccagcacgcctggtcctacaccaacggcatcgacatgaacgcggtgctgaagggcttccctgagtgcctgcaggctgacatctgcctgcacctgaaccgctcactgctgcagcactgcaaacccttccgaggggccaccaagggctgccttcgggccctggccatgaagttcaagaccacacatgcaccgccaggggacacactggtgcatgctggggacctgctcaccgccctgtacttcatctcccggggctccatcgagatcctgcggggcgacgtcgtcgtggccatcctggggaagaatgacatctttggggagcctctgaacctgtatgcaaggcctggcaagtcgaacggggatgtgcgggccctcacctactgtgacctacacaagatccatcgggacgacctgctggaggtgctggacatgtaccctgagttctccgaccacttctggtccagcctggagatcaccttcaacctgcgagataccaacatgatcccgggctcccccggcagtacggagttagagggtggcttcagtcggcaacgcaagcgcaagttgtccttccgcaggcgcacggacaaggacacggagcagccaggggaggtgtcggccttggggccgggccgggcgggggcagggccgagtagccggggccggccgggggggccgtggggggagagcccgtccagtggcccctccagccctgagagcagtgaggatgagggcccaggccgcagctccagccccctccgcctggtgcccttctccagccccaggccccccggagagccgccgggtggggagcccctgatggaggactgcgagaagagcagcgacacttgcaaccccctgtcaggcgccttctcaggagtgtccaacattttcagcttctggggggacagtcggggccgccagtaccaggagctccctcgatgccccgcccccacccccagcctcctcaacatccccctctccagcccgggtcggcggccccggggcgacgtggagagcaggctggatgccctccagcgccagctcaacaggctggagacccggctgagtgcagacatggccactgtcctgcagctgctacagaggcagatgacgctggtcccgcccgcctacagtgctgtgaccaccccggggcctggccccacttccacatccccgctgttgcccgtcagccccctccccaccctcaccttggactcgctttctcaggtttcccagttcatggcgtgtgaggagctgcccccgggggccccagagcttccccaagaaggccccacacgacgcctctccctaccgggccagctgggggccctcacctcccagcccctgcacagacacggctcggacccgggcagttagtggggctgcccagtgtggacacgtggctcacccagggatcaaggcgctgctgggccgctccccttggaggccctgctcaggaggccctgaccgtggaaggggagaggaactcgaaagcacagctcctcccccagcccttgggaccatcttctcctgcagtcccctgggccccagtgagaggggcaggggcagggccggcagtaggtggggcctgtggtccccccactgccctgagggcattagctggtctaactgcccggaggcacccggccctgggccttaggcacctcaaggacttttctgctatttactgctcttattgttaaggataataattaaggatcatatgaataattaatgaagatgctgatgactatgaataataaataattatcctgaggaga

SEQ ID NO: 870 - DNA, 3884 bp, Homo sapiens
  source 1..3884: mol_type = genomic DNA
  misc_feature 1..3884: note = cDNA of KCNH2 gene SNP c.362C>T (p.Ala121Val)
atgccggtgcggaggggccacgtcgcgccgcagaacaccttcctggacaccatcatccgcaagtttgagggccagagccgtaagttcatcatcgccaacgctcgggtggagaactgcgccgtcatctactgcaacgacggcttctgcgagctgtgcggctactcgcgggccgaggtgatgcagcgaccctgcacctgcgacttcctgcacgggccgcgcacgcagcgccgcgctgccgcgcagatcgcgcaggcactgctgggcgccgaggagcgcaaagtggaaatcgccttctaccggaaagatgggagctgcttcctatgtctggtggatgtggtgcccgtgaagaacgaggatggggttgtcatcatgttcatcctcaatttcgaggtggtgatggagaaggacatggtggggtccccggctcatgacaccaaccaccggggcccccccaccagctggctggccccaggccgcgccaagaccttccgcctgaagctgcccgcgctgctggcgctgacggcccgggagtcgtcggtgcggtcgggcggcgcgggcggcgcgggcgccccgggggccgtggtggtggacgtggacctgacgcccgcggcacccagcagcgagtcgctggccctggacgaagtgacagccatggacaaccacgtggcagggctcgggcccgcggaggagcggcgtgcgctggtgggtcccggctctccgccccgcagcgcgcccggccagctcccatcgccccgggcgcacagcctcaaccccgacgcctcgggctccagctgcagcctggcccggacgcgctcccgagaaagctgcgccagcgtgcgccgcgcctcgtcggccgacgacatcgaggccatgcgcgccggggtgctgcccccgccaccgcgccacgccagcaccggggccatgcacccactgcgcagcggcttgctcaactccacctcggactccgacctcgtgcgctaccgcaccattagcaagattccccaaatcaccctcaactttgtggacctcaagggcgaccccttcttggcttcgcccaccagtgaccgtgagatcatagcacctaagataaaggagcgaacccacaatgtcactgagaaggtcacccaggtcctgtccctgggcgccgacgtgctgcctgagtacaagctgcaggcaccgcgcatccaccgctggaccatcctgcattacagccccttcaaggccgtgtgggactggctcatcctgctgctggtcatctacacggctgtcttcacaccctactcggctgccttcctgctgaaggagacggaagaaggcccgcctgctaccgagtgtggctacgcctgccagccgctggctgtggtggacctcatcgtggacatcatgttcattgtggacatcctcatcaacttccgcaccacctacgtcaatgccaacgaggaggtggtcagccaccccggccgcatcgccgtccactacttcaagggctggttcctcatcgacatggtggccgccatccccttcgacctgctcatcttcggctctggctctgaggagctgatcgggctgctgaagactgcgcggctgctgcggctggtgcgcgtggcgcggaagctggatcgctactcagagtacggcgcggccgtgctgttcttgctcatgtgcacctttgcgctcatcgcgcactggctagcctgcatctggtacgccatcggcaacatggagcagccacacatggactcacgcatcggctggctgcacaacctgggcgaccagataggcaaaccctacaacagcagcggcctgggcggcccctccatcaaggacaagtatgtgacggcgctctacttcaccttcagcagcctcaccagtgtgggcttcggcaacgtctctcccaacaccaactcagagaagatcttctccatctgcgtcatgctcattggctccctcatgtatgctagcatcttcggcaacgtgtcggccatcatccagcggctgtactcgggcacagcccgctaccacacacagatgctgcgggtgcgggagttcatccgcttccaccagatccccaatcccctgcgccagcgcctcgaggagtacttccagcacgcctggtcctacaccaacggcatcgacatgaacgcggtgctgaagggcttccctgagtgcctgcaggctgacatctgcctgcacctgaaccgctcactgctgcagcactgcaaacccttccgaggggccaccaagggctgccttcgggccctggccatgaagttcaagaccacacatgcaccgccaggggacacactggtgcatgctggggacctgctcaccgccctgtacttcatctcccggggctccatcgagatcctgcggggcgacgtcgtcgtggccatcctggggaagaatgacatctttggggagcctctgaacctgtatgcaaggcctggcaagtcgaacggggatgtgcgggccctcacctactgtgacctacacaagatccatcgggacgacctgctggaggtgctggacatgtaccctgagttctccgaccacttctggtccagcctggagatcaccttcaacctgcgagataccaacatgatcccgggctcccccggcagtacggagttagagggtggcttcagtcggcaacgcaagcgcaagttgtccttccgcaggcgcacggacaaggacacggagcagccaggggaggtgtcggccttggggccgggccgggcgggggcagggccgagtagccggggccggccgggggggccgtggggggagagcccgtccagtggcccctccagccctgagagcagtgaggatgagggcccaggccgcagctccagccccctccgcctggtgcccttctccagccccaggccccccggagagccgccgggtggggagcccctgatggaggactgcgagaagagcagcgacacttgcaaccccctgtcaggcgccttctcaggagtgtccaacattttcagcttctggggggacagtcggggccgccagtaccaggagctccctcgatgccccgcccccacccccagcctcctcaacatccccctctccagcccgggtcggcggccccggggcgacgtggagagcaggctggatgccctccagcgccagctcaacaggctggagacccggctgagtgcagacatggccactgtcctgcagctgctacagaggcagatgacgctggtcccgcccgcctacagtgctgtgaccaccccggggcctggccccacttccacatccccgctgttgcccgtcagccccctccccaccctcaccttggactcgctttctcaggtttcccagttcatggcgtgtgaggagctgcccccgggggccccagagcttccccaagaaggccccacacgacgcctctccctaccgggccagctgggggccctcacctcccagcccctgcacagacacggctcggacccgggcagttagtggggctgcccagtgtggacacgtggctcacccagggatcaaggcgctgctgggccgctccccttggaggccctgctcaggaggccctgaccgtggaaggggagaggaactcgaaagcacagctcctcccccagcccttgggaccatcttctcctgcagtcccctgggccccagtgagaggggcaggggcagggccggcagtaggtggggcctgtggtccccccactgccctgagggcattagctggtctaactgcccggaggcacccggccctgggccttaggcacctcaaggacttttctgctatttactgctcttattgttaaggataataattaaggatcatatgaataattaatgaagatgctgatgactatgaataataaataattatcctgaggaga

SEQ ID NO: 871 - DNA, 3884 bp, Homo sapiens
  source 1..3884: mol_type = genomic DNA
  misc_feature 1..3884: note = cDNA of KCNH2 gene SNP c.371T>C (p.Met124Thr)
atgccggtgcggaggggccacgtcgcgccgcagaacaccttcctggacaccatcatccgcaagtttgagggccagagccgtaagttcatcatcgccaacgctcgggtggagaactgcgccgtcatctactgcaacgacggcttctgcgagctgtgcggctactcgcgggccgaggtgatgcagcgaccctgcacctgcgacttcctgcacgggccgcgcacgcagcgccgcgctgccgcgcagatcgcgcaggcactgctgggcgccgaggagcgcaaagtggaaatcgccttctaccggaaagatgggagctgcttcctatgtctggtggatgtggtgcccgtgaagaacgaggatggggctgtcatcacgttcatcctcaatttcgaggtggtgatggagaaggacatggtggggtccccggctcatgacaccaaccaccggggcccccccaccagctggctggccccaggccgcgccaagaccttccgcctgaagctgcccgcgctgctggcgctgacggcccgggagtcgtcggtgcggtcgggcggcgcgggcggcgcgggcgccccgggggccgtggtggtggacgtggacctgacgcccgcggcacccagcagcgagtcgctggccctggacgaagtgacagccatggacaaccacgtggcagggctcgggcccgcggaggagcggcgtgcgctggtgggtcccggctctccgccccgcagcgcgcccggccagctcccatcgccccgggcgcacagcctcaaccccgacgcctcgggctccagctgcagcctggcccggacgcgctcccgagaaagctgcgccagcgtgcgccgcgcctcgtcggccgacgacatcgaggccatgcgcgccggggtgctgcccccgccaccgcgccacgccagcaccggggccatgcacccactgcgcagcggcttgctcaactccacctcggactccgacctcgtgcgctaccgcaccattagcaagattccccaaatcaccctcaactttgtggacctcaagggcgaccccttcttggcttcgcccaccagtgaccgtgagatcatagcacctaagataaaggagcgaacccacaatgtcactgagaaggtcacccaggtcctgtccctgggcgccgacgtgctgcctgagtacaagctgcaggcaccgcgcatccaccgctggaccatcctgcattacagccccttcaaggccgtgtgggactggctcatcctgctgctggtcatctacacggctgtcttcacaccctactcggctgccttcctgctgaaggagacggaagaaggcccgcctgctaccgagtgtggctacgcctgccagccgctggctgtggtggacctcatcgtggacatcatgttcattgtggacatcctcatcaacttccgcaccacctacgtcaatgccaacgaggaggtggtcagccaccccggccgcatcgccgtccactacttcaagggctggttcctcatcgacatggtggccgccatccccttcgacctgctcatcttcggctctggctctgaggagctgatcgggctgctgaagactgcgcggctgctgcggctggtgcgcgtggcgcggaagctggatcgctactcagagtacggcgcggccgtgctgttcttgctcatgtgcacctttgcgctcatcgcgcactggctagcctgcatctggtacgccatcggcaacatggagcagccacacatggactcacgcatcggctggctgcacaacctgggcgaccagataggcaaaccctacaacagcagcggcctgggcggcccctccatcaaggacaagtatgtgacggcgctctacttcaccttcagcagcctcaccagtgtgggcttcggcaacgtctctcccaacaccaactcagagaagatcttctccatctgcgtcatgctcattggctccctcatgtatgctagcatcttcggcaacgtgtcggccatcatccagcggctgtactcgggcacagcccgctaccacacacagatgctgcgggtgcgggagttcatccgcttccaccagatccccaatcccctgcgccagcgcctcgaggagtacttccagcacgcctggtcctacaccaacggcatcgacatgaacgcggtgctgaagggcttccctgagtgcctgcaggctgacatctgcctgcacctgaaccgctcactgctgcagcactgcaaacccttccgaggggccaccaagggctgccttcgggccctggccatgaagttcaagaccacacatgcaccgccaggggacacactggtgcatgctggggacctgctcaccgccctgtacttcatctcccggggctccatcgagatcctgcggggcgacgtcgtcgtggccatcctggggaagaatgacatctttggggagcctctgaacctgtatgcaaggcctggcaagtcgaacggggatgtgcgggccctcacctactgtgacctacacaagatccatcgggacgacctgctggaggtgctggacatgtaccctgagttctccgaccacttctggtccagcctggagatcaccttcaacctgcgagataccaacatgatcccgggctcccccggcagtacggagttagagggtggcttcagtcggcaacgcaagcgcaagttgtccttccgcaggcgcacggacaaggacacggagcagccaggggaggtgtcggccttggggccgggccgggcgggggcagggccgagtagccggggccggccgggggggccgtggggggagagcccgtccagtggcccctccagccctgagagcagtgaggatgagggcccaggccgcagctccagccccctccgcctggtgcccttctccagccccaggccccccggagagccgccgggtggggagcccctgatggaggactgcgagaagagcagcgacacttgcaaccccctgtcaggcgccttctcaggagtgtccaacattttcagcttctggggggacagtcggggccgccagtaccaggagctccctcgatgccccgcccccacccccagcctcctcaacatccccctctccagcccgggtcggcggccccggggcgacgtggagagcaggctggatgccctccagcgccagctcaacaggctggagacccggctgagtgcagacatggccactgtcctgcagctgctacagaggcagatgacgctggtcccgcccgcctacagtgctgtgaccaccccggggcctggccccacttccacatccccgctgttgcccgtcagccccctccccaccctcaccttggactcgctttctcaggtttcccagttcatggcgtgtgaggagctgcccccgggggccccagagcttccccaagaaggccccacacgacgcctctccctaccgggccagctgggggccctcacctcccagcccctgcacagacacggctcggacccgggcagttagtggggctgcccagtgtggacacgtggctcacccagggatcaaggcgctgctgggccgctccccttggaggccctgctcaggaggccctgaccgtggaaggggagaggaactcgaaagcacagctcctcccccagcccttgggaccatcttctcctgcagtcccctgggccccagtgagaggggcaggggcagggccggcagtaggtggggcctgtggtccccccactgccctgagggcattagctggtctaactgcccggaggcacccggccctgggccttaggcacctcaaggacttttctgctatttactgctcttattgttaaggataataattaaggatcatatgaataattaatgaagatgctgatgactatgaataataaataattatcctgaggaga

SEQ ID NO: 872 - DNA, 3884 bp, Homo sapiens
  source 1..3884: mol_type = genomic DNA
  misc_feature 1..3884: note = cDNA of KCNH2 gene SNP c.371T>G (p.Met124Arg)
atgccggtgcggaggggccacgtcgcgccgcagaacaccttcctggacaccatcatccgcaagtttgagggccagagccgtaagttcatcatcgccaacgctcgggtggagaactgcgccgtcatctactgcaacgacggcttctgcgagctgtgcggctactcgcgggccgaggtgatgcagcgaccctgcacctgcgacttcctgcacgggccgcgcacgcagcgccgcgctgccgcgcagatcgcgcaggcactgctgggcgccgaggagcgcaaagtggaaatcgccttctaccggaaagatgggagctgcttcctatgtctggtggatgtggtgcccgtgaagaacgaggatggggctgtcatcaggttcatcctcaatttcgaggtggtgatggagaaggacatggtggggtccccggctcatgacaccaaccaccggggcccccccaccagctggctggccccaggccgcgccaagaccttccgcctgaagctgcccgcgctgctggcgctgacggcccgggagtcgtcggtgcggtcgggcggcgcgggcggcgcgggcgccccgggggccgtggtggtggacgtggacctgacgcccgcggcacccagcagcgagtcgctggccctggacgaagtgacagccatggacaaccacgtggcagggctcgggcccgcggaggagcggcgtgcgctggtgggtcccggctctccgccccgcagcgcgcccggccagctcccatcgccccgggcgcacagcctcaaccccgacgcctcgggctccagctgcagcctggcccggacgcgctcccgagaaagctgcgccagcgtgcgccgcgcctcgtcggccgacgacatcgaggccatgcgcgccggggtgctgcccccgccaccgcgccacgccagcaccggggccatgcacccactgcgcagcggcttgctcaactccacctcggactccgacctcgtgcgctaccgcaccattagcaagattccccaaatcaccctcaactttgtggacctcaagggcgaccccttcttggcttcgcccaccagtgaccgtgagatcatagcacctaagataaaggagcgaacccacaatgtcactgagaaggtcacccaggtcctgtccctgggcgccgacgtgctgcctgagtacaagctgcaggcaccgcgcatccaccgctggaccatcctgcattacagccccttcaaggccgtgtgggactggctcatcctgctgctggtcatctacacggctgtcttcacaccctactcggctgccttcctgctgaaggagacggaagaaggcccgcctgctaccgagtgtggctacgcctgccagccgctggctgtggtggacctcatcgtggacatcatgttcattgtggacatcctcatcaacttccgcaccacctacgtcaatgccaacgaggaggtggtcagccaccccggccgcatcgccgtccactacttcaagggctggttcctcatcgacatggtggccgccatccccttcgacctgctcatcttcggctctggctctgaggagctgatcgggctgctgaagactgcgcggctgctgcggctggtgcgcgtggcgcggaagctggatcgctactcagagtacggcgcggccgtgctgttcttgctcatgtgcacctttgcgctcatcgcgcactggctagcctgcatctggtacgccatcggcaacatggagcagccacacatggactcacgcatcggctggctgcacaacctgggcgaccagataggcaaaccctacaacagcagcggcctgggcggcccctccatcaaggacaagtatgtgacggcgctctacttcaccttcagcagcctcaccagtgtgggcttcggcaacgtctctcccaacaccaactcagagaagatcttctccatctgcgtcatgctcattggctccctcatgtatgctagcatcttcggcaacgtgtcggccatcatccagcggctgtactcgggcacagcccgctaccacacacagatgctgcgggtgcgggagttcatccgcttccaccagatccccaatcccctgcgccagcgcctcgaggagtacttccagcacgcctggtcctacaccaacggcatcgacatgaacgcggtgctgaagggcttccctgagtgcctgcaggctgacatctgcctgcacctgaaccgctcactgctgcagcactgcaaacccttccgaggggccaccaagggctgccttcgggccctggccatgaagttcaagaccacacatgcaccgccaggggacacactggtgcatgctggggacctgctcaccgccctgtacttcatctcccggggctccatcgagatcctgcggggcgacgtcgtcgtggccatcctggggaagaatgacatctttggggagcctctgaacctgtatgcaaggcctggcaagtcgaacggggatgtgcgggccctcacctactgtgacctacacaagatccatcgggacgacctgctggaggtgctggacatgtaccctgagttctccgaccacttctggtccagcctggagatcaccttcaacctgcgagataccaacatgatcccgggctcccccggcagtacggagttagagggtggcttcagtcggcaacgcaagcgcaagttgtccttccgcaggcgcacggacaaggacacggagcagccaggggaggtgtcggccttggggccgggccgggcgggggcagggccgagtagccggggccggccgggggggccgtggggggagagcccgtccagtggcccctccagccctgagagcagtgaggatgagggcccaggccgcagctccagccccctccgcctggtgcccttctccagccccaggccccccggagagccgccgggtggggagcccctgatggaggactgcgagaagagcagcgacacttgcaaccccctgtcaggcgccttctcaggagtgtccaacattttcagcttctggggggacagtcggggccgccagtaccaggagctccctcgatgccccgcccccacccccagcctcctcaacatccccctctccagcccgggtcggcggccccggggcgacgtggagagcaggctggatgccctccagcgccagctcaacaggctggagacccggctgagtgcagacatggccactgtcctgcagctgctacagaggcagatgacgctggtcccgcccgcctacagtgctgtgaccaccccggggcctggccccacttccacatccccgctgttgcccgtcagccccctccccaccctcaccttggactcgctttctcaggtttcccagttcatggcgtgtgaggagctgcccccgggggccccagagcttccccaagaaggccccacacgacgcctctccctaccgggccagctgggggccctcacctcccagcccctgcacagacacggctcggacccgggcagttagtggggctgcccagtgtggacacgtggctcacccagggatcaaggcgctgctgggccgctccccttggaggccctgctcaggaggccctgaccgtggaaggggagaggaactcgaaagcacagctcctcccccagcccttgggaccatcttctcctgcagtcccctgggccccagtgagaggggcaggggcagggccggcagtaggtggggcctgtggtccccccactgccctgagggcattagctggtctaactgcccggaggcacccggccctgggccttaggcacctcaaggacttttctgctatttactgctcttattgttaaggataataattaaggatcatatgaataattaatgaagatgctgatgactatgaataataaataattatcctgaggaga

SEQ ID NO: 873 - DNA, 3884 bp, Homo sapiens
  source 1..3884: mol_type = genomic DNA
  misc_feature 1..3884: note = cDNA of KCNH2 gene SNP c.373T>C (p.Phe125Leu)
atgccggtgcggaggggccacgtcgcgccgcagaacaccttcctggacaccatcatccgcaagtttgagggccagagccgtaagttcatcatcgccaacgctcgggtggagaactgcgccgtcatctactgcaacgacggcttctgcgagctgtgcggctactcgcgggccgaggtgatgcagcgaccctgcacctgcgacttcctgcacgggccgcgcacgcagcgccgcgctgccgcgcagatcgcgcaggcactgctgggcgccgaggagcgcaaagtggaaatcgccttctaccggaaagatgggagctgcttcctatgtctggtggatgtggtgcccgtgaagaacgaggatggggctgtcatcatgctcatcctcaatttcgaggtggtgatggagaaggacatggtggggtccccggctcatgacaccaaccaccggggcccccccaccagctggctggccccaggccgcgccaagaccttccgcctgaagctgcccgcgctgctggcgctgacggcccgggagtcgtcggtgcggtcgggcggcgcgggcggcgcgggcgccccgggggccgtggtggtggacgtggacctgacgcccgcggcacccagcagcgagtcgctggccctggacgaagtgacagccatggacaaccacgtggcagggctcgggcccgcggaggagcggcgtgcgctggtgggtcccggctctccgccccgcagcgcgcccggccagctcccatcgccccgggcgcacagcctcaaccccgacgcctcgggctccagctgcagcctggcccggacgcgctcccgagaaagctgcgccagcgtgcgccgcgcctcgtcggccgacgacatcgaggccatgcgcgccggggtgctgcccccgccaccgcgccacgccagcaccggggccatgcacccactgcgcagcggcttgctcaactccacctcggactccgacctcgtgcgctaccgcaccattagcaagattccccaaatcaccctcaactttgtggacctcaagggcgaccccttcttggcttcgcccaccagtgaccgtgagatcatagcacctaagataaaggagcgaacccacaatgtcactgagaaggtcacccaggtcctgtccctgggcgccgacgtgctgcctgagtacaagctgcaggcaccgcgcatccaccgctggaccatcctgcattacagccccttcaaggccgtgtgggactggctcatcctgctgctggtcatctacacggctgtcttcacaccctactcggctgccttcctgctgaaggagacggaagaaggcccgcctgctaccgagtgtggctacgcctgccagccgctggctgtggtggacctcatcgtggacatcatgttcattgtggacatcctcatcaacttccgcaccacctacgtcaatgccaacgaggaggtggtcagccaccccggccgcatcgccgtccactacttcaagggctggttcctcatcgacatggtggccgccatccccttcgacctgctcatcttcggctctggctctgaggagctgatcgggctgctgaagactgcgcggctgctgcggctggtgcgcgtggcgcggaagctggatcgctactcagagtacggcgcggccgtgctgttcttgctcatgtgcacctttgcgctcatcgcgcactggctagcctgcatctggtacgccatcggcaacatggagcagccacacatggactcacgcatcggctggctgcacaacctgggcgaccagataggcaaaccctacaacagcagcggcctgggcggcccctccatcaaggacaagtatgtgacggcgctctacttcaccttcagcagcctcaccagtgtgggcttcggcaacgtctctcccaacaccaactcagagaagatcttctccatctgcgtcatgctcattggctccctcatgtatgctagcatcttcggcaacgtgtcggccatcatccagcggctgtactcgggcacagcccgctaccacacacagatgctgcgggtgcgggagttcatccgcttccaccagatccccaatcccctgcgccagcgcctcgaggagtacttccagcacgcctggtcctacaccaacggcatcgacatgaacgcggtgctgaagggcttccctgagtgcctgcaggctgacatctgcctgcacctgaaccgctcactgctgcagcactgcaaacccttccgaggggccaccaagggctgccttcgggccctggccatgaagttcaagaccacacatgcaccgccaggggacacactggtgcatgctggggacctgctcaccgccctgtacttcatctcccggggctccatcgagatcctgcggggcgacgtcgtcgtggccatcctggggaagaatgacatctttggggagcctctgaacctgtatgcaaggcctggcaagtcgaacggggatgtgcgggccctcacctactgtgacctacacaagatccatcgggacgacctgctggaggtgctggacatgtaccctgagttctccgaccacttctggtccagcctggagatcaccttcaacctgcgagataccaacatgatcccgggctcccccggcagtacggagttagagggtggcttcagtcggcaacgcaagcgcaagttgtccttccgcaggcgcacggacaaggacacggagcagccaggggaggtgtcggccttggggccgggccgggcgggggcagggccgagtagccggggccggccgggggggccgtggggggagagcccgtccagtggcccctccagccctgagagcagtgaggatgagggcccaggccgcagctccagccccctccgcctggtgcccttctccagccccaggccccccggagagccgccgggtggggagcccctgatggaggactgcgagaagagcagcgacacttgcaaccccctgtcaggcgccttctcaggagtgtccaacattttcagcttctggggggacagtcggggccgccagtaccaggagctccctcgatgccccgcccccacccccagcctcctcaacatccccctctccagcccgggtcggcggccccggggcgacgtggagagcaggctggatgccctccagcgccagctcaacaggctggagacccggctgagtgcagacatggccactgtcctgcagctgctacagaggcagatgacgctggtcccgcccgcctacagtgctgtgaccaccccggggcctggccccacttccacatccccgctgttgcccgtcagccccctccccaccctcaccttggactcgctttctcaggtttcccagttcatggcgtgtgaggagctgcccccgggggccccagagcttccccaagaaggccccacacgacgcctctccctaccgggccagctgggggccctcacctcccagcccctgcacagacacggctcggacccgggcagttagtggggctgcccagtgtggacacgtggctcacccagggatcaaggcgctgctgggccgctccccttggaggccctgctcaggaggccctgaccgtggaaggggagaggaactcgaaagcacagctcctcccccagcccttgggaccatcttctcctgcagtcccctgggccccagtgagaggggcaggggcagggccggcagtaggtggggcctgtggtccccccactgccctgagggcattagctggtctaactgcccggaggcacccggccctgggccttaggcacctcaaggacttttctgctatttactgctcttattgttaaggataataattaaggatcatatgaataattaatgaagatgctgatgactatgaataataaataattatcctgaggaga

SEQ ID NO: 874 - DNA, 3884 bp, Homo sapiens
  source 1..3884: mol_type = genomic DNA
  misc_feature 1..3884: note = cDNA of KCNH2 gene SNP c.374T>G (p.Phe125Cys)
atgccggtgcggaggggccacgtcgcgccgcagaacaccttcctggacaccatcatccgcaagtttgagggccagagccgtaagttcatcatcgccaacgctcgggtggagaactgcgccgtcatctactgcaacgacggcttctgcgagctgtgcggctactcgcgggccgaggtgatgcagcgaccctgcacctgcgacttcctgcacgggccgcgcacgcagcgccgcgctgccgcgcagatcgcgcaggcactgctgggcgccgaggagcgcaaagtggaaatcgccttctaccggaaagatgggagctgcttcctatgtctggtggatgtggtgcccgtgaagaacgaggatggggctgtcatcatgtgcatcctcaatttcgaggtggtgatggagaaggacatggtggggtccccggctcatgacaccaaccaccggggcccccccaccagctggctggccccaggccgcgccaagaccttccgcctgaagctgcccgcgctgctggcgctgacggcccgggagtcgtcggtgcggtcgggcggcgcgggcggcgcgggcgccccgggggccgtggtggtggacgtggacctgacgcccgcggcacccagcagcgagtcgctggccctggacgaagtgacagccatggacaaccacgtggcagggctcgggcccgcggaggagcggcgtgcgctggtgggtcccggctctccgccccgcagcgcgcccggccagctcccatcgccccgggcgcacagcctcaaccccgacgcctcgggctccagctgcagcctggcccggacgcgctcccgagaaagctgcgccagcgtgcgccgcgcctcgtcggccgacgacatcgaggccatgcgcgccggggtgctgcccccgccaccgcgccacgccagcaccggggccatgcacccactgcgcagcggcttgctcaactccacctcggactccgacctcgtgcgctaccgcaccattagcaagattccccaaatcaccctcaactttgtggacctcaagggcgaccccttcttggcttcgcccaccagtgaccgtgagatcatagcacctaagataaaggagcgaacccacaatgtcactgagaaggtcacccaggtcctgtccctgggcgccgacgtgctgcctgagtacaagctgcaggcaccgcgcatccaccgctggaccatcctgcattacagccccttcaaggccgtgtgggactggctcatcctgctgctggtcatctacacggctgtcttcacaccctactcggctgccttcctgctgaaggagacggaagaaggcccgcctgctaccgagtgtggctacgcctgccagccgctggctgtggtggacctcatcgtggacatcatgttcattgtggacatcctcatcaacttccgcaccacctacgtcaatgccaacgaggaggtggtcagccaccccggccgcatcgccgtccactacttcaagggctggttcctcatcgacatggtggccgccatccccttcgacctgctcatcttcggctctggctctgaggagctgatcgggctgctgaagactgcgcggctgctgcggctggtgcgcgtggcgcggaagctggatcgctactcagagtacggcgcggccgtgctgttcttgctcatgtgcacctttgcgctcatcgcgcactggctagcctgcatctggtacgccatcggcaacatggagcagccacacatggactcacgcatcggctggctgcacaacctgggcgaccagataggcaaaccctacaacagcagcggcctgggcggcccctccatcaaggacaagtatgtgacggcgctctacttcaccttcagcagcctcaccagtgtgggcttcggcaacgtctctcccaacaccaactcagagaagatcttctccatctgcgtcatgctcattggctccctcatgtatgctagcatcttcggcaacgtgtcggccatcatccagcggctgtactcgggcacagcccgctaccacacacagatgctgcgggtgcgggagttcatccgcttccaccagatccccaatcccctgcgccagcgcctcgaggagtacttccagcacgcctggtcctacaccaacggcatcgacatgaacgcggtgctgaagggcttccctgagtgcctgcaggctgacatctgcctgcacctgaaccgctcactgctgcagcactgcaaacccttccgaggggccaccaagggctgccttcgggccctggccatgaagttcaagaccacacatgcaccgccaggggacacactggtgcatgctggggacctgctcaccgccctgtacttcatctcccggggctccatcgagatcctgcggggcgacgtcgtcgtggccatcctggggaagaatgacatctttggggagcctctgaacctgtatgcaaggcctggcaagtcgaacggggatgtgcgggccctcacctactgtgacctacacaagatccatcgggacgacctgctggaggtgctggacatgtaccctgagttctccgaccacttctggtccagcctggagatcaccttcaacctgcgagataccaacatgatcccgggctcccccggcagtacggagttagagggtggcttcagtcggcaacgcaagcgcaagttgtccttccgcaggcgcacggacaaggacacggagcagccaggggaggtgtcggccttggggccgggccgggcgggggcagggccgagtagccggggccggccgggggggccgtggggggagagcccgtccagtggcccctccagccctgagagcagtgaggatgagggcccaggccgcagctccagccccctccgcctggtgcccttctccagccccaggccccccggagagccgccgggtggggagcccctgatggaggactgcgagaagagcagcgacacttgcaaccccctgtcaggcgccttctcaggagtgtccaacattttcagcttctggggggacagtcggggccgccagtaccaggagctccctcgatgccccgcccccacccccagcctcctcaacatccccctctccagcccgggtcggcggccccggggcgacgtggagagcaggctggatgccctccagcgccagctcaacaggctggagacccggctgagtgcagacatggccactgtcctgcagctgctacagaggcagatgacgctggtcccgcccgcctacagtgctgtgaccaccccggggcctggccccacttccacatccccgctgttgcccgtcagccccctccccaccctcaccttggactcgctttctcaggtttcccagttcatggcgtgtgaggagctgcccccgggggccccagagcttccccaagaaggccccacacgacgcctctccctaccgggccagctgggggccctcacctcccagcccctgcacagacacggctcggacccgggcagttagtggggctgcccagtgtggacacgtggctcacccagggatcaaggcgctgctgggccgctccccttggaggccctgctcaggaggccctgaccgtggaaggggagaggaactcgaaagcacagctcctcccccagcccttgggaccatcttctcctgcagtcccctgggccccagtgagaggggcaggggcagggccggcagtaggtggggcctgtggtccccccactgccctgagggcattagctggtctaactgcccggaggcacccggccctgggccttaggcacctcaaggacttttctgctatttactgctcttattgttaaggataataattaaggatcatatgaataattaatgaagatgctgatgactatgaataataaataattatcctgaggaga

SEQ ID NO: 875 - DNA, 3884 bp, Homo sapiens
  source 1..3884: mol_type = genomic DNA
  misc_feature 1..3884: note = cDNA of KCNH2 gene SNP c.377T>A (p.Ile126Asn)
atgccggtgcggaggggccacgtcgcgccgcagaacaccttcctggacaccatcatccgcaagtttgagggccagagccgtaagttcatcatcgccaacgctcgggtggagaactgcgccgtcatctactgcaacgacggcttctgcgagctgtgcggctactcgcgggccgaggtgatgcagcgaccctgcacctgcgacttcctgcacgggccgcgcacgcagcgccgcgctgccgcgcagatcgcgcaggcactgctgggcgccgaggagcgcaaagtggaaatcgccttctaccggaaagatgggagctgcttcctatgtctggtggatgtggtgcccgtgaagaacgaggatggggctgtcatcatgttcaacctcaatttcgaggtggtgatggagaaggacatggtggggtccccggctcatgacaccaaccaccggggcccccccaccagctggctggccccaggccgcgccaagaccttccgcctgaagctgcccgcgctgctggcgctgacggcccgggagtcgtcggtgcggtcgggcggcgcgggcggcgcgggcgccccgggggccgtggtggtggacgtggacctgacgcccgcggcacccagcagcgagtcgctggccctggacgaagtgacagccatggacaaccacgtggcagggctcgggcccgcggaggagcggcgtgcgctggtgggtcccggctctccgccccgcagcgcgcccggccagctcccatcgccccgggcgcacagcctcaaccccgacgcctcgggctccagctgcagcctggcccggacgcgctcccgagaaagctgcgccagcgtgcgccgcgcctcgtcggccgacgacatcgaggccatgcgcgccggggtgctgcccccgccaccgcgccacgccagcaccggggccatgcacccactgcgcagcggcttgctcaactccacctcggactccgacctcgtgcgctaccgcaccattagcaagattccccaaatcaccctcaactttgtggacctcaagggcgaccccttcttggcttcgcccaccagtgaccgtgagatcatagcacctaagataaaggagcgaacccacaatgtcactgagaaggtcacccaggtcctgtccctgggcgccgacgtgctgcctgagtacaagctgcaggcaccgcgcatccaccgctggaccatcctgcattacagccccttcaaggccgtgtgggactggctcatcctgctgctggtcatctacacggctgtcttcacaccctactcggctgccttcctgctgaaggagacggaagaaggcccgcctgctaccgagtgtggctacgcctgccagccgctggctgtggtggacctcatcgtggacatcatgttcattgtggacatcctcatcaacttccgcaccacctacgtcaatgccaacgaggaggtggtcagccaccccggccgcatcgccgtccactacttcaagggctggttcctcatcgacatggtggccgccatccccttcgacctgctcatcttcggctctggctctgaggagctgatcgggctgctgaagactgcgcggctgctgcggctggtgcgcgtggcgcggaagctggatcgctactcagagtacggcgcggccgtgctgttcttgctcatgtgcacctttgcgctcatcgcgcactggctagcctgcatctggtacgccatcggcaacatggagcagccacacatggactcacgcatcggctggctgcacaacctgggcgaccagataggcaaaccctacaacagcagcggcctgggcggcccctccatcaaggacaagtatgtgacggcgctctacttcaccttcagcagcctcaccagtgtgggcttcggcaacgtctctcccaacaccaactcagagaagatcttctccatctgcgtcatgctcattggctccctcatgtatgctagcatcttcggcaacgtgtcggccatcatccagcggctgtactcgggcacagcccgctaccacacacagatgctgcgggtgcgggagttcatccgcttccaccagatccccaatcccctgcgccagcgcctcgaggagtacttccagcacgcctggtcctacaccaacggcatcgacatgaacgcggtgctgaagggcttccctgagtgcctgcaggctgacatctgcctgcacctgaaccgctcactgctgcagcactgcaaacccttccgaggggccaccaagggctgccttcgggccctggccatgaagttcaagaccacacatgcaccgccaggggacacactggtgcatgctggggacctgctcaccgccctgtacttcatctcccggggctccatcgagatcctgcggggcgacgtcgtcgtggccatcctggggaagaatgacatctttggggagcctctgaacctgtatgcaaggcctggcaagtcgaacggggatgtgcgggccctcacctactgtgacctacacaagatccatcgggacgacctgctggaggtgctggacatgtaccctgagttctccgaccacttctggtccagcctggagatcaccttcaacctgcgagataccaacatgatcccgggctcccccggcagtacggagttagagggtggcttcagtcggcaacgcaagcgcaagttgtccttccgcaggcgcacggacaaggacacggagcagccaggggaggtgtcggccttggggccgggccgggcgggggcagggccgagtagccggggccggccgggggggccgtggggggagagcccgtccagtggcccctccagccctgagagcagtgaggatgagggcccaggccgcagctccagccccctccgcctggtgcccttctccagccccaggccccccggagagccgccgggtggggagcccctgatggaggactgcgagaagagcagcgacacttgcaaccccctgtcaggcgccttctcaggagtgtccaacattttcagcttctggggggacagtcggggccgccagtaccaggagctccctcgatgccccgcccccacccccagcctcctcaacatccccctctccagcccgggtcggcggccccggggcgacgtggagagcaggctggatgccctccagcgccagctcaacaggctggagacccggctgagtgcagacatggccactgtcctgcagctgctacagaggcagatgacgctggtcccgcccgcctacagtgctgtgaccaccccggggcctggccccacttccacatccccgctgttgcccgtcagccccctccccaccctcaccttggactcgctttctcaggtttcccagttcatggcgtgtgaggagctgcccccgggggccccagagcttccccaagaaggccccacacgacgcctctccctaccgggccagctgggggccctcacctcccagcccctgcacagacacggctcggacccgggcagttagtggggctgcccagtgtggacacgtggctcacccagggatcaaggcgctgctgggccgctccccttggaggccctgctcaggaggccctgaccgtggaaggggagaggaactcgaaagcacagctcctcccccagcccttgggaccatcttctcctgcagtcccctgggccccagtgagaggggcaggggcagggccggcagtaggtggggcctgtggtccccccactgccctgagggcattagctggtctaactgcccggaggcacccggccctgggccttaggcacctcaaggacttttctgctatttactgctcttattgttaaggataataattaaggatcatatgaataattaatgaagatgctgatgactatgaataataaataattatcctgaggaga

SEQ ID NO: 876 - DNA, 3884 bp, Homo sapiens
  source 1..3884: mol_type = genomic DNA
  misc_feature 1..3884: note = cDNA of KCNH2 gene SNP c.379C>T (p.Leu127Phe)
atgccggtgcggaggggccacgtcgcgccgcagaacaccttcctggacaccatcatccgcaagtttgagggccagagccgtaagttcatcatcgccaacgctcgggtggagaactgcgccgtcatctactgcaacgacggcttctgcgagctgtgcggctactcgcgggccgaggtgatgcagcgaccctgcacctgcgacttcctgcacgggccgcgcacgcagcgccgcgctgccgcgcagatcgcgcaggcactgctgggcgccgaggagcgcaaagtggaaatcgccttctaccggaaagatgggagctgcttcctatgtctggtggatgtggtgcccgtgaagaacgaggatggggctgtcatcatgttcatcttcaatttcgaggtggtgatggagaaggacatggtggggtccccggctcatgacaccaaccaccggggcccccccaccagctggctggccccaggccgcgccaagaccttccgcctgaagctgcccgcgctgctggcgctgacggcccgggagtcgtcggtgcggtcgggcggcgcgggcggcgcgggcgccccgggggccgtggtggtggacgtggacctgacgcccgcggcacccagcagcgagtcgctggccctggacgaagtgacagccatggacaaccacgtggcagggctcgggcccgcggaggagcggcgtgcgctggtgggtcccggctctccgccccgcagcgcgcccggccagctcccatcgccccgggcgcacagcctcaaccccgacgcctcgggctccagctgcagcctggcccggacgcgctcccgagaaagctgcgccagcgtgcgccgcgcctcgtcggccgacgacatcgaggccatgcgcgccggggtgctgcccccgccaccgcgccacgccagcaccggggccatgcacccactgcgcagcggcttgctcaactccacctcggactccgacctcgtgcgctaccgcaccattagcaagattccccaaatcaccctcaactttgtggacctcaagggcgaccccttcttggcttcgcccaccagtgaccgtgagatcatagcacctaagataaaggagcgaacccacaatgtcactgagaaggtcacccaggtcctgtccctgggcgccgacgtgctgcctgagtacaagctgcaggcaccgcgcatccaccgctggaccatcctgcattacagccccttcaaggccgtgtgggactggctcatcctgctgctggtcatctacacggctgtcttcacaccctactcggctgccttcctgctgaaggagacggaagaaggcccgcctgctaccgagtgtggctacgcctgccagccgctggctgtggtggacctcatcgtggacatcatgttcattgtggacatcctcatcaacttccgcaccacctacgtcaatgccaacgaggaggtggtcagccaccccggccgcatcgccgtccactacttcaagggctggttcctcatcgacatggtggccgccatccccttcgacctgctcatcttcggctctggctctgaggagctgatcgggctgctgaagactgcgcggctgctgcggctggtgcgcgtggcgcggaagctggatcgctactcagagtacggcgcggccgtgctgttcttgctcatgtgcacctttgcgctcatcgcgcactggctagcctgcatctggtacgccatcggcaacatggagcagccacacatggactcacgcatcggctggctgcacaacctgggcgaccagataggcaaaccctacaacagcagcggcctgggcggcccctccatcaaggacaagtatgtgacggcgctctacttcaccttcagcagcctcaccagtgtgggcttcggcaacgtctctcccaacaccaactcagagaagatcttctccatctgcgtcatgctcattggctccctcatgtatgctagcatcttcggcaacgtgtcggccatcatccagcggctgtactcgggcacagcccgctaccacacacagatgctgcgggtgcgggagttcatccgcttccaccagatccccaatcccctgcgccagcgcctcgaggagtacttccagcacgcctggtcctacaccaacggcatcgacatgaacgcggtgctgaagggcttccctgagtgcctgcaggctgacatctgcctgcacctgaaccgctcactgctgcagcactgcaaacccttccgaggggccaccaagggctgccttcgggccctggccatgaagttcaagaccacacatgcaccgccaggggacacactggtgcatgctggggacctgctcaccgccctgtacttcatctcccggggctccatcgagatcctgcggggcgacgtcgtcgtggccatcctggggaagaatgacatctttggggagcctctgaacctgtatgcaaggcctggcaagtcgaacggggatgtgcgggccctcacctactgtgacctacacaagatccatcgggacgacctgctggaggtgctggacatgtaccctgagttctccgaccacttctggtccagcctggagatcaccttcaacctgcgagataccaacatgatcccgggctcccccggcagtacggagttagagggtggcttcagtcggcaacgcaagcgcaagttgtccttccgcaggcgcacggacaaggacacggagcagccaggggaggtgtcggccttggggccgggccgggcgggggcagggccgagtagccggggccggccgggggggccgtggggggagagcccgtccagtggcccctccagccctgagagcagtgaggatgagggcccaggccgcagctccagccccctccgcctggtgcccttctccagccccaggccccccggagagccgccgggtggggagcccctgatggaggactgcgagaagagcagcgacacttgcaaccccctgtcaggcgccttctcaggagtgtccaacattttcagcttctggggggacagtcggggccgccagtaccaggagctccctcgatgccccgcccccacccccagcctcctcaacatccccctctccagcccgggtcggcggccccggggcgacgtggagagcaggctggatgccctccagcgccagctcaacaggctggagacccggctgagtgcagacatggccactgtcctgcagctgctacagaggcagatgacgctggtcccgcccgcctacagtgctgtgaccaccccggggcctggccccacttccacatccccgctgttgcccgtcagccccctccccaccctcaccttggactcgctttctcaggtttcccagttcatggcgtgtgaggagctgcccccgggggccccagagcttccccaagaaggccccacacgacgcctctccctaccgggccagctgggggccctcacctcccagcccctgcacagacacggctcggacccgggcagttagtggggctgcccagtgtggacacgtggctcacccagggatcaaggcgctgctgggccgctccccttggaggccctgctcaggaggccctgaccgtggaaggggagaggaactcgaaagcacagctcctcccccagcccttgggaccatcttctcctgcagtcccctgggccccagtgagaggggcaggggcagggccggcagtaggtggggcctgtggtccccccactgccctgagggcattagctggtctaactgcccggaggcacccggccctgggccttaggcacctcaaggacttttctgctatttactgctcttattgttaaggataataattaaggatcatatgaataattaatgaagatgctgatgactatgaataataaataattatcctgaggaga

SEQ ID NO: 877 - DNA, 3884 bp, Homo sapiens
  source 1..3884: mol_type = genomic DNA
  misc_feature 1..3884: note = cDNA of KCNH2 gene SNP c.383A>G (p.Asn128Ser)
atgccggtgcggaggggccacgtcgcgccgcagaacaccttcctggacaccatcatccgcaagtttgagggccagagccgtaagttcatcatcgccaacgctcgggtggagaactgcgccgtcatctactgcaacgacggcttctgcgagctgtgcggctactcgcgggccgaggtgatgcagcgaccctgcacctgcgacttcctgcacgggccgcgcacgcagcgccgcgctgccgcgcagatcgcgcaggcactgctgggcgccgaggagcgcaaagtggaaatcgccttctaccggaaagatgggagctgcttcctatgtctggtggatgtggtgcccgtgaagaacgaggatggggctgtcatcatgttcatcctcagtttcgaggtggtgatggagaaggacatggtggggtccccggctcatgacaccaaccaccggggcccccccaccagctggctggccccaggccgcgccaagaccttccgcctgaagctgcccgcgctgctggcgctgacggcccgggagtcgtcggtgcggtcgggcggcgcgggcggcgcgggcgccccgggggccgtggtggtggacgtggacctgacgcccgcggcacccagcagcgagtcgctggccctggacgaagtgacagccatggacaaccacgtggcagggctcgggcccgcggaggagcggcgtgcgctggtgggtcccggctctccgccccgcagcgcgcccggccagctcccatcgccccgggcgcacagcctcaaccccgacgcctcgggctccagctgcagcctggcccggacgcgctcccgagaaagctgcgccagcgtgcgccgcgcctcgtcggccgacgacatcgaggccatgcgcgccggggtgctgcccccgccaccgcgccacgccagcaccggggccatgcacccactgcgcagcggcttgctcaactccacctcggactccgacctcgtgcgctaccgcaccattagcaagattccccaaatcaccctcaactttgtggacctcaagggcgaccccttcttggcttcgcccaccagtgaccgtgagatcatagcacctaagataaaggagcgaacccacaatgtcactgagaaggtcacccaggtcctgtccctgggcgccgacgtgctgcctgagtacaagctgcaggcaccgcgcatccaccgctggaccatcctgcattacagccccttcaaggccgtgtgggactggctcatcctgctgctggtcatctacacggctgtcttcacaccctactcggctgccttcctgctgaaggagacggaagaaggcccgcctgctaccgagtgtggctacgcctgccagccgctggctgtggtggacctcatcgtggacatcatgttcattgtggacatcctcatcaacttccgcaccacctacgtcaatgccaacgaggaggtggtcagccaccccggccgcatcgccgtccactacttcaagggctggttcctcatcgacatggtggccgccatccccttcgacctgctcatcttcggctctggctctgaggagctgatcgggctgctgaagactgcgcggctgctgcggctggtgcgcgtggcgcggaagctggatcgctactcagagtacggcgcggccgtgctgttcttgctcatgtgcacctttgcgctcatcgcgcactggctagcctgcatctggtacgccatcggcaacatggagcagccacacatggactcacgcatcggctggctgcacaacctgggcgaccagataggcaaaccctacaacagcagcggcctgggcggcccctccatcaaggacaagtatgtgacggcgctctacttcaccttcagcagcctcaccagtgtgggcttcggcaacgtctctcccaacaccaactcagagaagatcttctccatctgcgtcatgctcattggctccctcatgtatgctagcatcttcggcaacgtgtcggccatcatccagcggctgtactcgggcacagcccgctaccacacacagatgctgcgggtgcgggagttcatccgcttccaccagatccccaatcccctgcgccagcgcctcgaggagtacttccagcacgcctggtcctacaccaacggcatcgacatgaacgcggtgctgaagggcttccctgagtgcctgcaggctgacatctgcctgcacctgaaccgctcactgctgcagcactgcaaacccttccgaggggccaccaagggctgccttcgggccctggccatgaagttcaagaccacacatgcaccgccaggggacacactggtgcatgctggggacctgctcaccgccctgtacttcatctcccggggctccatcgagatcctgcggggcgacgtcgtcgtggccatcctggggaagaatgacatctttggggagcctctgaacctgtatgcaaggcctggcaagtcgaacggggatgtgcgggccctcacctactgtgacctacacaagatccatcgggacgacctgctggaggtgctggacatgtaccctgagttctccgaccacttctggtccagcctggagatcaccttcaacctgcgagataccaacatgatcccgggctcccccggcagtacggagttagagggtggcttcagtcggcaacgcaagcgcaagttgtccttccgcaggcgcacggacaaggacacggagcagccaggggaggtgtcggccttggggccgggccgggcgggggcagggccgagtagccggggccggccgggggggccgtggggggagagcccgtccagtggcccctccagccctgagagcagtgaggatgagggcccaggccgcagctccagccccctccgcctggtgcccttctccagccccaggccccccggagagccgccgggtggggagcccctgatggaggactgcgagaagagcagcgacacttgcaaccccctgtcaggcgccttctcaggagtgtccaacattttcagcttctggggggacagtcggggccgccagtaccaggagctccctcgatgccccgcccccacccccagcctcctcaacatccccctctccagcccgggtcggcggccccggggcgacgtggagagcaggctggatgccctccagcgccagctcaacaggctggagacccggctgagtgcagacatggccactgtcctgcagctgctacagaggcagatgacgctggtcccgcccgcctacagtgctgtgaccaccccggggcctggccccacttccacatccccgctgttgcccgtcagccccctccccaccctcaccttggactcgctttctcaggtttcccagttcatggcgtgtgaggagctgcccccgggggccccagagcttccccaagaaggccccacacgacgcctctccctaccgggccagctgggggccctcacctcccagcccctgcacagacacggctcggacccgggcagttagtggggctgcccagtgtggacacgtggctcacccagggatcaaggcgctgctgggccgctccccttggaggccctgctcaggaggccctgaccgtggaaggggagaggaactcgaaagcacagctcctcccccagcccttgggaccatcttctcctgcagtcccctgggccccagtgagaggggcaggggcagggccggcagtaggtggggcctgtggtccccccactgccctgagggcattagctggtctaactgcccggaggcacccggccctgggccttaggcacctcaaggacttttctgctatttactgctcttattgttaaggataataattaaggatcatatgaataattaatgaagatgctgatgactatgaataataaataattatcctgaggaga

SEQ ID NO: 878 - DNA, 3884 bp, Homo sapiens
  source 1..3884: mol_type = genomic DNA
  misc_feature 1..3884: note = cDNA of KCNH2 gene SNP c.387C>G (p.Phe129Leu)
atgccggtgcggaggggccacgtcgcgccgcagaacaccttcctggacaccatcatccgcaagtttgagggccagagccgtaagttcatcatcgccaacgctcgggtggagaactgcgccgtcatctactgcaacgacggcttctgcgagctgtgcggctactcgcgggccgaggtgatgcagcgaccctgcacctgcgacttcctgcacgggccgcgcacgcagcgccgcgctgccgcgcagatcgcgcaggcactgctgggcgccgaggagcgcaaagtggaaatcgccttctaccggaaagatgggagctgcttcctatgtctggtggatgtggtgcccgtgaagaacgaggatggggctgtcatcatgttcatcctcaatttggaggtggtgatggagaaggacatggtggggtccccggctcatgacaccaaccaccggggcccccccaccagctggctggccccaggccgcgccaagaccttccgcctgaagctgcccgcgctgctggcgctgacggcccgggagtcgtcggtgcggtcgggcggcgcgggcggcgcgggcgccccgggggccgtggtggtggacgtggacctgacgcccgcggcacccagcagcgagtcgctggccctggacgaagtgacagccatggacaaccacgtggcagggctcgggcccgcggaggagcggcgtgcgctggtgggtcccggctctccgccccgcagcgcgcccggccagctcccatcgccccgggcgcacagcctcaaccccgacgcctcgggctccagctgcagcctggcccggacgcgctcccgagaaagctgcgccagcgtgcgccgcgcctcgtcggccgacgacatcgaggccatgcgcgccggggtgctgcccccgccaccgcgccacgccagcaccggggccatgcacccactgcgcagcggcttgctcaactccacctcggactccgacctcgtgcgctaccgcaccattagcaagattccccaaatcaccctcaactttgtggacctcaagggcgaccccttcttggcttcgcccaccagtgaccgtgagatcatagcacctaagataaaggagcgaacccacaatgtcactgagaaggtcacccaggtcctgtccctgggcgccgacgtgctgcctgagtacaagctgcaggcaccgcgcatccaccgctggaccatcctgcattacagccccttcaaggccgtgtgggactggctcatcctgctgctggtcatctacacggctgtcttcacaccctactcggctgccttcctgctgaaggagacggaagaaggcccgcctgctaccgagtgtggctacgcctgccagccgctggctgtggtggacctcatcgtggacatcatgttcattgtggacatcctcatcaacttccgcaccacctacgtcaatgccaacgaggaggtggtcagccaccccggccgcatcgccgtccactacttcaagggctggttcctcatcgacatggtggccgccatccccttcgacctgctcatcttcggctctggctctgaggagctgatcgggctgctgaagactgcgcggctgctgcggctggtgcgcgtggcgcggaagctggatcgctactcagagtacggcgcggccgtgctgttcttgctcatgtgcacctttgcgctcatcgcgcactggctagcctgcatctggtacgccatcggcaacatggagcagccacacatggactcacgcatcggctggctgcacaacctgggcgaccagataggcaaaccctacaacagcagcggcctgggcggcccctccatcaaggacaagtatgtgacggcgctctacttcaccttcagcagcctcaccagtgtgggcttcggcaacgtctctcccaacaccaactcagagaagatcttctccatctgcgtcatgctcattggctccctcatgtatgctagcatcttcggcaacgtgtcggccatcatccagcggctgtactcgggcacagcccgctaccacacacagatgctgcgggtgcgggagttcatccgcttccaccagatccccaatcccctgcgccagcgcctcgaggagtacttccagcacgcctggtcctacaccaacggcatcgacatgaacgcggtgctgaagggcttccctgagtgcctgcaggctgacatctgcctgcacctgaaccgctcactgctgcagcactgcaaacccttccgaggggccaccaagggctgccttcgggccctggccatgaagttcaagaccacacatgcaccgccaggggacacactggtgcatgctggggacctgctcaccgccctgtacttcatctcccggggctccatcgagatcctgcggggcgacgtcgtcgtggccatcctggggaagaatgacatctttggggagcctctgaacctgtatgcaaggcctggcaagtcgaacggggatgtgcgggccctcacctactgtgacctacacaagatccatcgggacgacctgctggaggtgctggacatgtaccctgagttctccgaccacttctggtccagcctggagatcaccttcaacctgcgagataccaacatgatcccgggctcccccggcagtacggagttagagggtggcttcagtcggcaacgcaagcgcaagttgtccttccgcaggcgcacggacaaggacacggagcagccaggggaggtgtcggccttggggccgggccgggcgggggcagggccgagtagccggggccggccgggggggccgtggggggagagcccgtccagtggcccctccagccctgagagcagtgaggatgagggcccaggccgcagctccagccccctccgcctggtgcccttctccagccccaggccccccggagagccgccgggtggggagcccctgatggaggactgcgagaagagcagcgacacttgcaaccccctgtcaggcgccttctcaggagtgtccaacattttcagcttctggggggacagtcggggccgccagtaccaggagctccctcgatgccccgcccccacccccagcctcctcaacatccccctctccagcccgggtcggcggccccggggcgacgtggagagcaggctggatgccctccagcgccagctcaacaggctggagacccggctgagtgcagacatggccactgtcctgcagctgctacagaggcagatgacgctggtcccgcccgcctacagtgctgtgaccaccccggggcctggccccacttccacatccccgctgttgcccgtcagccccctccccaccctcaccttggactcgctttctcaggtttcccagttcatggcgtgtgaggagctgcccccgggggccccagagcttccccaagaaggccccacacgacgcctctccctaccgggccagctgggggccctcacctcccagcccctgcacagacacggctcggacccgggcagttagtggggctgcccagtgtggacacgtggctcacccagggatcaaggcgctgctgggccgctccccttggaggccctgctcaggaggccctgaccgtggaaggggagaggaactcgaaagcacagctcctcccccagcccttgggaccatcttctcctgcagtcccctgggccccagtgagaggggcaggggcagggccggcagtaggtggggcctgtggtccccccactgccctgagggcattagctggtctaactgcccggaggcacccggccctgggccttaggcacctcaaggacttttctgctatttactgctcttattgttaaggataataattaaggatcatatgaataattaatgaagatgctgatgactatgaataataaataattatcctgaggaga

SEQ ID NO: 879 - DNA, 3884 bp, Homo sapiens
  source 1..3884: mol_type = genomic DNA
  misc_feature 1..3884: note = cDNA of KCNH2 gene SNP c.388G>A (p.Glu130Lys)
atgccggtgcggaggggccacgtcgcgccgcagaacaccttcctggacaccatcatccgcaagtttgagggccagagccgtaagttcatcatcgccaacgctcgggtggagaactgcgccgtcatctactgcaacgacggcttctgcgagctgtgcggctactcgcgggccgaggtgatgcagcgaccctgcacctgcgacttcctgcacgggccgcgcacgcagcgccgcgctgccgcgcagatcgcgcaggcactgctgggcgccgaggagcgcaaagtggaaatcgccttctaccggaaagatgggagctgcttcctatgtctggtggatgtggtgcccgtgaagaacgaggatggggctgtcatcatgttcatcctcaatttcaaggtggtgatggagaaggacatggtggggtccccggctcatgacaccaaccaccggggcccccccaccagctggctggccccaggccgcgccaagaccttccgcctgaagctgcccgcgctgctggcgctgacggcccgggagtcgtcggtgcggtcgggcggcgcgggcggcgcgggcgccccgggggccgtggtggtggacgtggacctgacgcccgcggcacccagcagcgagtcgctggccctggacgaagtgacagccatggacaaccacgtggcagggctcgggcccgcggaggagcggcgtgcgctggtgggtcccggctctccgccccgcagcgcgcccggccagctcccatcgccccgggcgcacagcctcaaccccgacgcctcgggctccagctgcagcctggcccggacgcgctcccgagaaagctgcgccagcgtgcgccgcgcctcgtcggccgacgacatcgaggccatgcgcgccggggtgctgcccccgccaccgcgccacgccagcaccggggccatgcacccactgcgcagcggcttgctcaactccacctcggactccgacctcgtgcgctaccgcaccattagcaagattccccaaatcaccctcaactttgtggacctcaagggcgaccccttcttggcttcgcccaccagtgaccgtgagatcatagcacctaagataaaggagcgaacccacaatgtcactgagaaggtcacccaggtcctgtccctgggcgccgacgtgctgcctgagtacaagctgcaggcaccgcgcatccaccgctggaccatcctgcattacagccccttcaaggccgtgtgggactggctcatcctgctgctggtcatctacacggctgtcttcacaccctactcggctgccttcctgctgaaggagacggaagaaggcccgcctgctaccgagtgtggctacgcctgccagccgctggctgtggtggacctcatcgtggacatcatgttcattgtggacatcctcatcaacttccgcaccacctacgtcaatgccaacgaggaggtggtcagccaccccggccgcatcgccgtccactacttcaagggctggttcctcatcgacatggtggccgccatccccttcgacctgctcatcttcggctctggctctgaggagctgatcgggctgctgaagactgcgcggctgctgcggctggtgcgcgtggcgcggaagctggatcgctactcagagtacggcgcggccgtgctgttcttgctcatgtgcacctttgcgctcatcgcgcactggctagcctgcatctggtacgccatcggcaacatggagcagccacacatggactcacgcatcggctggctgcacaacctgggcgaccagataggcaaaccctacaacagcagcggcctgggcggcccctccatcaaggacaagtatgtgacggcgctctacttcaccttcagcagcctcaccagtgtgggcttcggcaacgtctctcccaacaccaactcagagaagatcttctccatctgcgtcatgctcattggctccctcatgtatgctagcatcttcggcaacgtgtcggccatcatccagcggctgtactcgggcacagcccgctaccacacacagatgctgcgggtgcgggagttcatccgcttccaccagatccccaatcccctgcgccagcgcctcgaggagtacttccagcacgcctggtcctacaccaacggcatcgacatgaacgcggtgctgaagggcttccctgagtgcctgcaggctgacatctgcctgcacctgaaccgctcactgctgcagcactgcaaacccttccgaggggccaccaagggctgccttcgggccctggccatgaagttcaagaccacacatgcaccgccaggggacacactggtgcatgctggggacctgctcaccgccctgtacttcatctcccggggctccatcgagatcctgcggggcgacgtcgtcgtggccatcctggggaagaatgacatctttggggagcctctgaacctgtatgcaaggcctggcaagtcgaacggggatgtgcgggccctcacctactgtgacctacacaagatccatcgggacgacctgctggaggtgctggacatgtaccctgagttctccgaccacttctggtccagcctggagatcaccttcaacctgcgagataccaacatgatcccgggctcccccggcagtacggagttagagggtggcttcagtcggcaacgcaagcgcaagttgtccttccgcaggcgcacggacaaggacacggagcagccaggggaggtgtcggccttggggccgggccgggcgggggcagggccgagtagccggggccggccgggggggccgtggggggagagcccgtccagtggcccctccagccctgagagcagtgaggatgagggcccaggccgcagctccagccccctccgcctggtgcccttctccagccccaggccccccggagagccgccgggtggggagcccctgatggaggactgcgagaagagcagcgacacttgcaaccccctgtcaggcgccttctcaggagtgtccaacattttcagcttctggggggacagtcggggccgccagtaccaggagctccctcgatgccccgcccccacccccagcctcctcaacatccccctctccagcccgggtcggcggccccggggcgacgtggagagcaggctggatgccctccagcgccagctcaacaggctggagacccggctgagtgcagacatggccactgtcctgcagctgctacagaggcagatgacgctggtcccgcccgcctacagtgctgtgaccaccccggggcctggccccacttccacatccccgctgttgcccgtcagccccctccccaccctcaccttggactcgctttctcaggtttcccagttcatggcgtgtgaggagctgcccccgggggccccagagcttccccaagaaggccccacacgacgcctctccctaccgggccagctgggggccctcacctcccagcccctgcacagacacggctcggacccgggcagttagtggggctgcccagtgtggacacgtggctcacccagggatcaaggcgctgctgggccgctccccttggaggccctgctcaggaggccctgaccgtggaaggggagaggaactcgaaagcacagctcctcccccagcccttgggaccatcttctcctgcagtcccctgggccccagtgagaggggcaggggcagggccggcagtaggtggggcctgtggtccccccactgccctgagggcattagctggtctaactgcccggaggcacccggccctgggccttaggcacctcaaggacttttctgctatttactgctcttattgttaaggataataattaaggatcatatgaataattaatgaagatgctgatgactatgaataataaataattatcctgaggaga

SEQ ID NO: 880 - DNA, 3884 bp, Homo sapiens
  source 1..3884: mol_type = genomic DNA
  misc_feature 1..3884: note = cDNA of KCNH2 gene SNP c.38C>A (p.Thr13Asn)
atgccggtgcggaggggccacgtcgcgccgcagaacaacttcctggacaccatcatccgcaagtttgagggccagagccgtaagttcatcatcgccaacgctcgggtggagaactgcgccgtcatctactgcaacgacggcttctgcgagctgtgcggctactcgcgggccgaggtgatgcagcgaccctgcacctgcgacttcctgcacgggccgcgcacgcagcgccgcgctgccgcgcagatcgcgcaggcactgctgggcgccgaggagcgcaaagtggaaatcgccttctaccggaaagatgggagctgcttcctatgtctggtggatgtggtgcccgtgaagaacgaggatggggctgtcatcatgttcatcctcaatttcgaggtggtgatggagaaggacatggtggggtccccggctcatgacaccaaccaccggggcccccccaccagctggctggccccaggccgcgccaagaccttccgcctgaagctgcccgcgctgctggcgctgacggcccgggagtcgtcggtgcggtcgggcggcgcgggcggcgcgggcgccccgggggccgtggtggtggacgtggacctgacgcccgcggcacccagcagcgagtcgctggccctggacgaagtgacagccatggacaaccacgtggcagggctcgggcccgcggaggagcggcgtgcgctggtgggtcccggctctccgccccgcagcgcgcccggccagctcccatcgccccgggcgcacagcctcaaccccgacgcctcgggctccagctgcagcctggcccggacgcgctcccgagaaagctgcgccagcgtgcgccgcgcctcgtcggccgacgacatcgaggccatgcgcgccggggtgctgcccccgccaccgcgccacgccagcaccggggccatgcacccactgcgcagcggcttgctcaactccacctcggactccgacctcgtgcgctaccgcaccattagcaagattccccaaatcaccctcaactttgtggacctcaagggcgaccccttcttggcttcgcccaccagtgaccgtgagatcatagcacctaagataaaggagcgaacccacaatgtcactgagaaggtcacccaggtcctgtccctgggcgccgacgtgctgcctgagtacaagctgcaggcaccgcgcatccaccgctggaccatcctgcattacagccccttcaaggccgtgtgggactggctcatcctgctgctggtcatctacacggctgtcttcacaccctactcggctgccttcctgctgaaggagacggaagaaggcccgcctgctaccgagtgtggctacgcctgccagccgctggctgtggtggacctcatcgtggacatcatgttcattgtggacatcctcatcaacttccgcaccacctacgtcaatgccaacgaggaggtggtcagccaccccggccgcatcgccgtccactacttcaagggctggttcctcatcgacatggtggccgccatccccttcgacctgctcatcttcggctctggctctgaggagctgatcgggctgctgaagactgcgcggctgctgcggctggtgcgcgtggcgcggaagctggatcgctactcagagtacggcgcggccgtgctgttcttgctcatgtgcacctttgcgctcatcgcgcactggctagcctgcatctggtacgccatcggcaacatggagcagccacacatggactcacgcatcggctggctgcacaacctgggcgaccagataggcaaaccctacaacagcagcggcctgggcggcccctccatcaaggacaagtatgtgacggcgctctacttcaccttcagcagcctcaccagtgtgggcttcggcaacgtctctcccaacaccaactcagagaagatcttctccatctgcgtcatgctcattggctccctcatgtatgctagcatcttcggcaacgtgtcggccatcatccagcggctgtactcgggcacagcccgctaccacacacagatgctgcgggtgcgggagttcatccgcttccaccagatccccaatcccctgcgccagcgcctcgaggagtacttccagcacgcctggtcctacaccaacggcatcgacatgaacgcggtgctgaagggcttccctgagtgcctgcaggctgacatctgcctgcacctgaaccgctcactgctgcagcactgcaaacccttccgaggggccaccaagggctgccttcgggccctggccatgaagttcaagaccacacatgcaccgccaggggacacactggtgcatgctggggacctgctcaccgccctgtacttcatctcccggggctccatcgagatcctgcggggcgacgtcgtcgtggccatcctggggaagaatgacatctttggggagcctctgaacctgtatgcaaggcctggcaagtcgaacggggatgtgcgggccctcacctactgtgacctacacaagatccatcgggacgacctgctggaggtgctggacatgtaccctgagttctccgaccacttctggtccagcctggagatcaccttcaacctgcgagataccaacatgatcccgggctcccccggcagtacggagttagagggtggcttcagtcggcaacgcaagcgcaagttgtccttccgcaggcgcacggacaaggacacggagcagccaggggaggtgtcggccttggggccgggccgggcgggggcagggccgagtagccggggccggccgggggggccgtggggggagagcccgtccagtggcccctccagccctgagagcagtgaggatgagggcccaggccgcagctccagccccctccgcctggtgcccttctccagccccaggccccccggagagccgccgggtggggagcccctgatggaggactgcgagaagagcagcgacacttgcaaccccctgtcaggcgccttctcaggagtgtccaacattttcagcttctggggggacagtcggggccgccagtaccaggagctccctcgatgccccgcccccacccccagcctcctcaacatccccctctccagcccgggtcggcggccccggggcgacgtggagagcaggctggatgccctccagcgccagctcaacaggctggagacccggctgagtgcagacatggccactgtcctgcagctgctacagaggcagatgacgctggtcccgcccgcctacagtgctgtgaccaccccggggcctggccccacttccacatccccgctgttgcccgtcagccccctccccaccctcaccttggactcgctttctcaggtttcccagttcatggcgtgtgaggagctgcccccgggggccccagagcttccccaagaaggccccacacgacgcctctccctaccgggccagctgggggccctcacctcccagcccctgcacagacacggctcggacccgggcagttagtggggctgcccagtgtggacacgtggctcacccagggatcaaggcgctgctgggccgctccccttggaggccctgctcaggaggccctgaccgtggaaggggagaggaactcgaaagcacagctcctcccccagcccttgggaccatcttctcctgcagtcccctgggccccagtgagaggggcaggggcagggccggcagtaggtggggcctgtggtccccccactgccctgagggcattagctggtctaactgcccggaggcacccggccctgggccttaggcacctcaaggacttttctgctatttactgctcttattgttaaggataataattaaggatcatatgaataattaatgaagatgctgatgactatgaataataaataattatcctgaggaga

SEQ ID NO: 881 - DNA, 3884 bp, Homo sapiens
  source 1..3884: mol_type = genomic DNA
  misc_feature 1..3884: note = cDNA of KCNH2 gene SNP c.391G>A (p.Val131Met)
atgccggtgcggaggggccacgtcgcgccgcagaacaccttcctggacaccatcatccgcaagtttgagggccagagccgtaagttcatcatcgccaacgctcgggtggagaactgcgccgtcatctactgcaacgacggcttctgcgagctgtgcggctactcgcgggccgaggtgatgcagcgaccctgcacctgcgacttcctgcacgggccgcgcacgcagcgccgcgctgccgcgcagatcgcgcaggcactgctgggcgccgaggagcgcaaagtggaaatcgccttctaccggaaagatgggagctgcttcctatgtctggtggatgtggtgcccgtgaagaacgaggatggggctgtcatcatgttcatcctcaatttcgagatggtgatggagaaggacatggtggggtccccggctcatgacaccaaccaccggggcccccccaccagctggctggccccaggccgcgccaagaccttccgcctgaagctgcccgcgctgctggcgctgacggcccgggagtcgtcggtgcggtcgggcggcgcgggcggcgcgggcgccccgggggccgtggtggtggacgtggacctgacgcccgcggcacccagcagcgagtcgctggccctggacgaagtgacagccatggacaaccacgtggcagggctcgggcccgcggaggagcggcgtgcgctggtgggtcccggctctccgccccgcagcgcgcccggccagctcccatcgccccgggcgcacagcctcaaccccgacgcctcgggctccagctgcagcctggcccggacgcgctcccgagaaagctgcgccagcgtgcgccgcgcctcgtcggccgacgacatcgaggccatgcgcgccggggtgctgcccccgccaccgcgccacgccagcaccggggccatgcacccactgcgcagcggcttgctcaactccacctcggactccgacctcgtgcgctaccgcaccattagcaagattccccaaatcaccctcaactttgtggacctcaagggcgaccccttcttggcttcgcccaccagtgaccgtgagatcatagcacctaagataaaggagcgaacccacaatgtcactgagaaggtcacccaggtcctgtccctgggcgccgacgtgctgcctgagtacaagctgcaggcaccgcgcatccaccgctggaccatcctgcattacagccccttcaaggccgtgtgggactggctcatcctgctgctggtcatctacacggctgtcttcacaccctactcggctgccttcctgctgaaggagacggaagaaggcccgcctgctaccgagtgtggctacgcctgccagccgctggctgtggtggacctcatcgtggacatcatgttcattgtggacatcctcatcaacttccgcaccacctacgtcaatgccaacgaggaggtggtcagccaccccggccgcatcgccgtccactacttcaagggctggttcctcatcgacatggtggccgccatccccttcgacctgctcatcttcggctctggctctgaggagctgatcgggctgctgaagactgcgcggctgctgcggctggtgcgcgtggcgcggaagctggatcgctactcagagtacggcgcggccgtgctgttcttgctcatgtgcacctttgcgctcatcgcgcactggctagcctgcatctggtacgccatcggcaacatggagcagccacacatggactcacgcatcggctggctgcacaacctgggcgaccagataggcaaaccctacaacagcagcggcctgggcggcccctccatcaaggacaagtatgtgacggcgctctacttcaccttcagcagcctcaccagtgtgggcttcggcaacgtctctcccaacaccaactcagagaagatcttctccatctgcgtcatgctcattggctccctcatgtatgctagcatcttcggcaacgtgtcggccatcatccagcggctgtactcgggcacagcccgctaccacacacagatgctgcgggtgcgggagttcatccgcttccaccagatccccaatcccctgcgccagcgcctcgaggagtacttccagcacgcctggtcctacaccaacggcatcgacatgaacgcggtgctgaagggcttccctgagtgcctgcaggctgacatctgcctgcacctgaaccgctcactgctgcagcactgcaaacccttccgaggggccaccaagggctgccttcgggccctggccatgaagttcaagaccacacatgcaccgccaggggacacactggtgcatgctggggacctgctcaccgccctgtacttcatctcccggggctccatcgagatcctgcggggcgacgtcgtcgtggccatcctggggaagaatgacatctttggggagcctctgaacctgtatgcaaggcctggcaagtcgaacggggatgtgcgggccctcacctactgtgacctacacaagatccatcgggacgacctgctggaggtgctggacatgtaccctgagttctccgaccacttctggtccagcctggagatcaccttcaacctgcgagataccaacatgatcccgggctcccccggcagtacggagttagagggtggcttcagtcggcaacgcaagcgcaagttgtccttccgcaggcgcacggacaaggacacggagcagccaggggaggtgtcggccttggggccgggccgggcgggggcagggccgagtagccggggccggccgggggggccgtggggggagagcccgtccagtggcccctccagccctgagagcagtgaggatgagggcccaggccgcagctccagccccctccgcctggtgcccttctccagccccaggccccccggagagccgccgggtggggagcccctgatggaggactgcgagaagagcagcgacacttgcaaccccctgtcaggcgccttctcaggagtgtccaacattttcagcttctggggggacagtcggggccgccagtaccaggagctccctcgatgccccgcccccacccccagcctcctcaacatccccctctccagcccgggtcggcggccccggggcgacgtggagagcaggctggatgccctccagcgccagctcaacaggctggagacccggctgagtgcagacatggccactgtcctgcagctgctacagaggcagatgacgctggtcccgcccgcctacagtgctgtgaccaccccggggcctggccccacttccacatccccgctgttgcccgtcagccccctccccaccctcaccttggactcgctttctcaggtttcccagttcatggcgtgtgaggagctgcccccgggggccccagagcttccccaagaaggccccacacgacgcctctccctaccgggccagctgggggccctcacctcccagcccctgcacagacacggctcggacccgggcagttagtggggctgcccagtgtggacacgtggctcacccagggatcaaggcgctgctgggccgctccccttggaggccctgctcaggaggccctgaccgtggaaggggagaggaactcgaaagcacagctcctcccccagcccttgggaccatcttctcctgcagtcccctgggccccagtgagaggggcaggggcagggccggcagtaggtggggcctgtggtccccccactgccctgagggcattagctggtctaactgcccggaggcacccggccctgggccttaggcacctcaaggacttttctgctatttactgctcttattgttaaggataataattaaggatcatatgaataattaatgaagatgctgatgactatgaataataaataattatcctgaggaga

SEQ ID NO: 882 - DNA, 3884 bp, Homo sapiens
  source 1..3884: mol_type = genomic DNA
  misc_feature 1..3884: note = cDNA of KCNH2 gene SNP c.391G>T (p.Val131Leu)
atgccggtgcggaggggccacgtcgcgccgcagaacaccttcctggacaccatcatccgcaagtttgagggccagagccgtaagttcatcatcgccaacgctcgggtggagaactgcgccgtcatctactgcaacgacggcttctgcgagctgtgcggctactcgcgggccgaggtgatgcagcgaccctgcacctgcgacttcctgcacgggccgcgcacgcagcgccgcgctgccgcgcagatcgcgcaggcactgctgggcgccgaggagcgcaaagtggaaatcgccttctaccggaaagatgggagctgcttcctatgtctggtggatgtggtgcccgtgaagaacgaggatggggctgtcatcatgttcatcctcaatttcgagttggtgatggagaaggacatggtggggtccccggctcatgacaccaaccaccggggcccccccaccagctggctggccccaggccgcgccaagaccttccgcctgaagctgcccgcgctgctggcgctgacggcccgggagtcgtcggtgcggtcgggcggcgcgggcggcgcgggcgccccgggggccgtggtggtggacgtggacctgacgcccgcggcacccagcagcgagtcgctggccctggacgaagtgacagccatggacaaccacgtggcagggctcgggcccgcggaggagcggcgtgcgctggtgggtcccggctctccgccccgcagcgcgcccggccagctcccatcgccccgggcgcacagcctcaaccccgacgcctcgggctccagctgcagcctggcccggacgcgctcccgagaaagctgcgccagcgtgcgccgcgcctcgtcggccgacgacatcgaggccatgcgcgccggggtgctgcccccgccaccgcgccacgccagcaccggggccatgcacccactgcgcagcggcttgctcaactccacctcggactccgacctcgtgcgctaccgcaccattagcaagattccccaaatcaccctcaactttgtggacctcaagggcgaccccttcttggcttcgcccaccagtgaccgtgagatcatagcacctaagataaaggagcgaacccacaatgtcactgagaaggtcacccaggtcctgtccctgggcgccgacgtgctgcctgagtacaagctgcaggcaccgcgcatccaccgctggaccatcctgcattacagccccttcaaggccgtgtgggactggctcatcctgctgctggtcatctacacggctgtcttcacaccctactcggctgccttcctgctgaaggagacggaagaaggcccgcctgctaccgagtgtggctacgcctgccagccgctggctgtggtggacctcatcgtggacatcatgttcattgtggacatcctcatcaacttccgcaccacctacgtcaatgccaacgaggaggtggtcagccaccccggccgcatcgccgtccactacttcaagggctggttcctcatcgacatggtggccgccatccccttcgacctgctcatcttcggctctggctctgaggagctgatcgggctgctgaagactgcgcggctgctgcggctggtgcgcgtggcgcggaagctggatcgctactcagagtacggcgcggccgtgctgttcttgctcatgtgcacctttgcgctcatcgcgcactggctagcctgcatctggtacgccatcggcaacatggagcagccacacatggactcacgcatcggctggctgcacaacctgggcgaccagataggcaaaccctacaacagcagcggcctgggcggcccctccatcaaggacaagtatgtgacggcgctctacttcaccttcagcagcctcaccagtgtgggcttcggcaacgtctctcccaacaccaactcagagaagatcttctccatctgcgtcatgctcattggctccctcatgtatgctagcatcttcggcaacgtgtcggccatcatccagcggctgtactcgggcacagcccgctaccacacacagatgctgcgggtgcgggagttcatccgcttccaccagatccccaatcccctgcgccagcgcctcgaggagtacttccagcacgcctggtcctacaccaacggcatcgacatgaacgcggtgctgaagggcttccctgagtgcctgcaggctgacatctgcctgcacctgaaccgctcactgctgcagcactgcaaacccttccgaggggccaccaagggctgccttcgggccctggccatgaagttcaagaccacacatgcaccgccaggggacacactggtgcatgctggggacctgctcaccgccctgtacttcatctcccggggctccatcgagatcctgcggggcgacgtcgtcgtggccatcctggggaagaatgacatctttggggagcctctgaacctgtatgcaaggcctggcaagtcgaacggggatgtgcgggccctcacctactgtgacctacacaagatccatcgggacgacctgctggaggtgctggacatgtaccctgagttctccgaccacttctggtccagcctggagatcaccttcaacctgcgagataccaacatgatcccgggctcccccggcagtacggagttagagggtggcttcagtcggcaacgcaagcgcaagttgtccttccgcaggcgcacggacaaggacacggagcagccaggggaggtgtcggccttggggccgggccgggcgggggcagggccgagtagccggggccggccgggggggccgtggggggagagcccgtccagtggcccctccagccctgagagcagtgaggatgagggcccaggccgcagctccagccccctccgcctggtgcccttctccagccccaggccccccggagagccgccgggtggggagcccctgatggaggactgcgagaagagcagcgacacttgcaaccccctgtcaggcgccttctcaggagtgtccaacattttcagcttctggggggacagtcggggccgccagtaccaggagctccctcgatgccccgcccccacccccagcctcctcaacatccccctctccagcccgggtcggcggccccggggcgacgtggagagcaggctggatgccctccagcgccagctcaacaggctggagacccggctgagtgcagacatggccactgtcctgcagctgctacagaggcagatgacgctggtcccgcccgcctacagtgctgtgaccaccccggggcctggccccacttccacatccccgctgttgcccgtcagccccctccccaccctcaccttggactcgctttctcaggtttcccagttcatggcgtgtgaggagctgcccccgggggccccagagcttccccaagaaggccccacacgacgcctctccctaccgggccagctgggggccctcacctcccagcccctgcacagacacggctcggacccgggcagttagtggggctgcccagtgtggacacgtggctcacccagggatcaaggcgctgctgggccgctccccttggaggccctgctcaggaggccctgaccgtggaaggggagaggaactcgaaagcacagctcctcccccagcccttgggaccatcttctcctgcagtcccctgggccccagtgagaggggcaggggcagggccggcagtaggtggggcctgtggtccccccactgccctgagggcattagctggtctaactgcccggaggcacccggccctgggccttaggcacctcaaggacttttctgctatttactgctcttattgttaaggataataattaaggatcatatgaataattaatgaagatgctgatgactatgaataataaataattatcctgaggaga

SEQ ID NO: 883 - DNA, 3884 bp, Homo sapiens
  source 1..3884: mol_type = genomic DNA
  misc_feature 1..3884: note = cDNA of KCNH2 gene SNP c.398T>C (p.Met133Thr)
atgccggtgcggaggggccacgtcgcgccgcagaacaccttcctggacaccatcatccgcaagtttgagggccagagccgtaagttcatcatcgccaacgctcgggtggagaactgcgccgtcatctactgcaacgacggcttctgcgagctgtgcggctactcgcgggccgaggtgatgcagcgaccctgcacctgcgacttcctgcacgggccgcgcacgcagcgccgcgctgccgcgcagatcgcgcaggcactgctgggcgccgaggagcgcaaagtggaaatcgccttctaccggaaagatgggagctgcttcctatgtctggtggatgtggtgcccgtgaagaacgaggatggggctgtcatcatgttcatcctcaatttcgaggtggtgacggagaaggacatggtggggtccccggctcatgacaccaaccaccggggcccccccaccagctggctggccccaggccgcgccaagaccttccgcctgaagctgcccgcgctgctggcgctgacggcccgggagtcgtcggtgcggtcgggcggcgcgggcggcgcgggcgccccgggggccgtggtggtggacgtggacctgacgcccgcggcacccagcagcgagtcgctggccctggacgaagtgacagccatggacaaccacgtggcagggctcgggcccgcggaggagcggcgtgcgctggtgggtcccggctctccgccccgcagcgcgcccggccagctcccatcgccccgggcgcacagcctcaaccccgacgcctcgggctccagctgcagcctggcccggacgcgctcccgagaaagctgcgccagcgtgcgccgcgcctcgtcggccgacgacatcgaggccatgcgcgccggggtgctgcccccgccaccgcgccacgccagcaccggggccatgcacccactgcgcagcggcttgctcaactccacctcggactccgacctcgtgcgctaccgcaccattagcaagattccccaaatcaccctcaactttgtggacctcaagggcgaccccttcttggcttcgcccaccagtgaccgtgagatcatagcacctaagataaaggagcgaacccacaatgtcactgagaaggtcacccaggtcctgtccctgggcgccgacgtgctgcctgagtacaagctgcaggcaccgcgcatccaccgctggaccatcctgcattacagccccttcaaggccgtgtgggactggctcatcctgctgctggtcatctacacggctgtcttcacaccctactcggctgccttcctgctgaaggagacggaagaaggcccgcctgctaccgagtgtggctacgcctgccagccgctggctgtggtggacctcatcgtggacatcatgttcattgtggacatcctcatcaacttccgcaccacctacgtcaatgccaacgaggaggtggtcagccaccccggccgcatcgccgtccactacttcaagggctggttcctcatcgacatggtggccgccatccccttcgacctgctcatcttcggctctggctctgaggagctgatcgggctgctgaagactgcgcggctgctgcggctggtgcgcgtggcgcggaagctggatcgctactcagagtacggcgcggccgtgctgttcttgctcatgtgcacctttgcgctcatcgcgcactggctagcctgcatctggtacgccatcggcaacatggagcagccacacatggactcacgcatcggctggctgcacaacctgggcgaccagataggcaaaccctacaacagcagcggcctgggcggcccctccatcaaggacaagtatgtgacggcgctctacttcaccttcagcagcctcaccagtgtgggcttcggcaacgtctctcccaacaccaactcagagaagatcttctccatctgcgtcatgctcattggctccctcatgtatgctagcatcttcggcaacgtgtcggccatcatccagcggctgtactcgggcacagcccgctaccacacacagatgctgcgggtgcgggagttcatccgcttccaccagatccccaatcccctgcgccagcgcctcgaggagtacttccagcacgcctggtcctacaccaacggcatcgacatgaacgcggtgctgaagggcttccctgagtgcctgcaggctgacatctgcctgcacctgaaccgctcactgctgcagcactgcaaacccttccgaggggccaccaagggctgccttcgggccctggccatgaagttcaagaccacacatgcaccgccaggggacacactggtgcatgctggggacctgctcaccgccctgtacttcatctcccggggctccatcgagatcctgcggggcgacgtcgtcgtggccatcctggggaagaatgacatctttggggagcctctgaacctgtatgcaaggcctggcaagtcgaacggggatgtgcgggccctcacctactgtgacctacacaagatccatcgggacgacctgctggaggtgctggacatgtaccctgagttctccgaccacttctggtccagcctggagatcaccttcaacctgcgagataccaacatgatcccgggctcccccggcagtacggagttagagggtggcttcagtcggcaacgcaagcgcaagttgtccttccgcaggcgcacggacaaggacacggagcagccaggggaggtgtcggccttggggccgggccgggcgggggcagggccgagtagccggggccggccgggggggccgtggggggagagcccgtccagtggcccctccagccctgagagcagtgaggatgagggcccaggccgcagctccagccccctccgcctggtgcccttctccagccccaggccccccggagagccgccgggtggggagcccctgatggaggactgcgagaagagcagcgacacttgcaaccccctgtcaggcgccttctcaggagtgtccaacattttcagcttctggggggacagtcggggccgccagtaccaggagctccctcgatgccccgcccccacccccagcctcctcaacatccccctctccagcccgggtcggcggccccggggcgacgtggagagcaggctggatgccctccagcgccagctcaacaggctggagacccggctgagtgcagacatggccactgtcctgcagctgctacagaggcagatgacgctggtcccgcccgcctacagtgctgtgaccaccccggggcctggccccacttccacatccccgctgttgcccgtcagccccctccccaccctcaccttggactcgctttctcaggtttcccagttcatggcgtgtgaggagctgcccccgggggccccagagcttccccaagaaggccccacacgacgcctctccctaccgggccagctgggggccctcacctcccagcccctgcacagacacggctcggacccgggcagttagtggggctgcccagtgtggacacgtggctcacccagggatcaaggcgctgctgggccgctccccttggaggccctgctcaggaggccctgaccgtggaaggggagaggaactcgaaagcacagctcctcccccagcccttgggaccatcttctcctgcagtcccctgggccccagtgagaggggcaggggcagggccggcagtaggtggggcctgtggtccccccactgccctgagggcattagctggtctaactgcccggaggcacccggccctgggccttaggcacctcaaggacttttctgctatttactgctcttattgttaaggataataattaaggatcatatgaataattaatgaagatgctgatgactatgaataataaataattatcctgaggaga

SEQ ID NO: 884 - DNA, 3884 bp, Homo sapiens
  source 1..3884: mol_type = genomic DNA
  misc_feature 1..3884: note = cDNA of KCNH2 gene SNP c.409A>G (p.Met137Val)
atgccggtgcggaggggccacgtcgcgccgcagaacaccttcctggacaccatcatccgcaagtttgagggccagagccgtaagttcatcatcgccaacgctcgggtggagaactgcgccgtcatctactgcaacgacggcttctgcgagctgtgcggctactcgcgggccgaggtgatgcagcgaccctgcacctgcgacttcctgcacgggccgcgcacgcagcgccgcgctgccgcgcagatcgcgcaggcactgctgggcgccgaggagcgcaaagtggaaatcgccttctaccggaaagatgggagctgcttcctatgtctggtggatgtggtgcccgtgaagaacgaggatggggctgtcatcatgttcatcctcaatttcgaggtggtgatggagaaggacgtggtggggtccccggctcatgacaccaaccaccggggcccccccaccagctggctggccccaggccgcgccaagaccttccgcctgaagctgcccgcgctgctggcgctgacggcccgggagtcgtcggtgcggtcgggcggcgcgggcggcgcgggcgccccgggggccgtggtggtggacgtggacctgacgcccgcggcacccagcagcgagtcgctggccctggacgaagtgacagccatggacaaccacgtggcagggctcgggcccgcggaggagcggcgtgcgctggtgggtcccggctctccgccccgcagcgcgcccggccagctcccatcgccccgggcgcacagcctcaaccccgacgcctcgggctccagctgcagcctggcccggacgcgctcccgagaaagctgcgccagcgtgcgccgcgcctcgtcggccgacgacatcgaggccatgcgcgccggggtgctgcccccgccaccgcgccacgccagcaccggggccatgcacccactgcgcagcggcttgctcaactccacctcggactccgacctcgtgcgctaccgcaccattagcaagattccccaaatcaccctcaactttgtggacctcaagggcgaccccttcttggcttcgcccaccagtgaccgtgagatcatagcacctaagataaaggagcgaacccacaatgtcactgagaaggtcacccaggtcctgtccctgggcgccgacgtgctgcctgagtacaagctgcaggcaccgcgcatccaccgctggaccatcctgcattacagccccttcaaggccgtgtgggactggctcatcctgctgctggtcatctacacggctgtcttcacaccctactcggctgccttcctgctgaaggagacggaagaaggcccgcctgctaccgagtgtggctacgcctgccagccgctggctgtggtggacctcatcgtggacatcatgttcattgtggacatcctcatcaacttccgcaccacctacgtcaatgccaacgaggaggtggtcagccaccccggccgcatcgccgtccactacttcaagggctggttcctcatcgacatggtggccgccatccccttcgacctgctcatcttcggctctggctctgaggagctgatcgggctgctgaagactgcgcggctgctgcggctggtgcgcgtggcgcggaagctggatcgctactcagagtacggcgcggccgtgctgttcttgctcatgtgcacctttgcgctcatcgcgcactggctagcctgcatctggtacgccatcggcaacatggagcagccacacatggactcacgcatcggctggctgcacaacctgggcgaccagataggcaaaccctacaacagcagcggcctgggcggcccctccatcaaggacaagtatgtgacggcgctctacttcaccttcagcagcctcaccagtgtgggcttcggcaacgtctctcccaacaccaactcagagaagatcttctccatctgcgtcatgctcattggctccctcatgtatgctagcatcttcggcaacgtgtcggccatcatccagcggctgtactcgggcacagcccgctaccacacacagatgctgcgggtgcgggagttcatccgcttccaccagatccccaatcccctgcgccagcgcctcgaggagtacttccagcacgcctggtcctacaccaacggcatcgacatgaacgcggtgctgaagggcttccctgagtgcctgcaggctgacatctgcctgcacctgaaccgctcactgctgcagcactgcaaacccttccgaggggccaccaagggctgccttcgggccctggccatgaagttcaagaccacacatgcaccgccaggggacacactggtgcatgctggggacctgctcaccgccctgtacttcatctcccggggctccatcgagatcctgcggggcgacgtcgtcgtggccatcctggggaagaatgacatctttggggagcctctgaacctgtatgcaaggcctggcaagtcgaacggggatgtgcgggccctcacctactgtgacctacacaagatccatcgggacgacctgctggaggtgctggacatgtaccctgagttctccgaccacttctggtccagcctggagatcaccttcaacctgcgagataccaacatgatcccgggctcccccggcagtacggagttagagggtggcttcagtcggcaacgcaagcgcaagttgtccttccgcaggcgcacggacaaggacacggagcagccaggggaggtgtcggccttggggccgggccgggcgggggcagggccgagtagccggggccggccgggggggccgtggggggagagcccgtccagtggcccctccagccctgagagcagtgaggatgagggcccaggccgcagctccagccccctccgcctggtgcccttctccagccccaggccccccggagagccgccgggtggggagcccctgatggaggactgcgagaagagcagcgacacttgcaaccccctgtcaggcgccttctcaggagtgtccaacattttcagcttctggggggacagtcggggccgccagtaccaggagctccctcgatgccccgcccccacccccagcctcctcaacatccccctctccagcccgggtcggcggccccggggcgacgtggagagcaggctggatgccctccagcgccagctcaacaggctggagacccggctgagtgcagacatggccactgtcctgcagctgctacagaggcagatgacgctggtcccgcccgcctacagtgctgtgaccaccccggggcctggccccacttccacatccccgctgttgcccgtcagccccctccccaccctcaccttggactcgctttctcaggtttcccagttcatggcgtgtgaggagctgcccccgggggccccagagcttccccaagaaggccccacacgacgcctctccctaccgggccagctgggggccctcacctcccagcccctgcacagacacggctcggacccgggcagttagtggggctgcccagtgtggacacgtggctcacccagggatcaaggcgctgctgggccgctccccttggaggccctgctcaggaggccctgaccgtggaaggggagaggaactcgaaagcacagctcctcccccagcccttgggaccatcttctcctgcagtcccctgggccccagtgagaggggcaggggcagggccggcagtaggtggggcctgtggtccccccactgccctgagggcattagctggtctaactgcccggaggcacccggccctgggccttaggcacctcaaggacttttctgctatttactgctcttattgttaaggataataattaaggatcatatgaataattaatgaagatgctgatgactatgaataataaataattatcctgaggaga

SEQ ID NO: 885 - DNA, 3884 bp, Homo sapiens
  source 1..3884: mol_type = genomic DNA
  misc_feature 1..3884: note = cDNA of KCNH2 gene SNP c.416G>C (p.Gly139Ala)
atgccggtgcggaggggccacgtcgcgccgcagaacaccttcctggacaccatcatccgcaagtttgagggccagagccgtaagttcatcatcgccaacgctcgggtggagaactgcgccgtcatctactgcaacgacggcttctgcgagctgtgcggctactcgcgggccgaggtgatgcagcgaccctgcacctgcgacttcctgcacgggccgcgcacgcagcgccgcgctgccgcgcagatcgcgcaggcactgctgggcgccgaggagcgcaaagtggaaatcgccttctaccggaaagatgggagctgcttcctatgtctggtggatgtggtgcccgtgaagaacgaggatggggctgtcatcatgttcatcctcaatttcgaggtggtgatggagaaggacatggtggcgtccccggctcatgacaccaaccaccggggcccccccaccagctggctggccccaggccgcgccaagaccttccgcctgaagctgcccgcgctgctggcgctgacggcccgggagtcgtcggtgcggtcgggcggcgcgggcggcgcgggcgccccgggggccgtggtggtggacgtggacctgacgcccgcggcacccagcagcgagtcgctggccctggacgaagtgacagccatggacaaccacgtggcagggctcgggcccgcggaggagcggcgtgcgctggtgggtcccggctctccgccccgcagcgcgcccggccagctcccatcgccccgggcgcacagcctcaaccccgacgcctcgggctccagctgcagcctggcccggacgcgctcccgagaaagctgcgccagcgtgcgccgcgcctcgtcggccgacgacatcgaggccatgcgcgccggggtgctgcccccgccaccgcgccacgccagcaccggggccatgcacccactgcgcagcggcttgctcaactccacctcggactccgacctcgtgcgctaccgcaccattagcaagattccccaaatcaccctcaactttgtggacctcaagggcgaccccttcttggcttcgcccaccagtgaccgtgagatcatagcacctaagataaaggagcgaacccacaatgtcactgagaaggtcacccaggtcctgtccctgggcgccgacgtgctgcctgagtacaagctgcaggcaccgcgcatccaccgctggaccatcctgcattacagccccttcaaggccgtgtgggactggctcatcctgctgctggtcatctacacggctgtcttcacaccctactcggctgccttcctgctgaaggagacggaagaaggcccgcctgctaccgagtgtggctacgcctgccagccgctggctgtggtggacctcatcgtggacatcatgttcattgtggacatcctcatcaacttccgcaccacctacgtcaatgccaacgaggaggtggtcagccaccccggccgcatcgccgtccactacttcaagggctggttcctcatcgacatggtggccgccatccccttcgacctgctcatcttcggctctggctctgaggagctgatcgggctgctgaagactgcgcggctgctgcggctggtgcgcgtggcgcggaagctggatcgctactcagagtacggcgcggccgtgctgttcttgctcatgtgcacctttgcgctcatcgcgcactggctagcctgcatctggtacgccatcggcaacatggagcagccacacatggactcacgcatcggctggctgcacaacctgggcgaccagataggcaaaccctacaacagcagcggcctgggcggcccctccatcaaggacaagtatgtgacggcgctctacttcaccttcagcagcctcaccagtgtgggcttcggcaacgtctctcccaacaccaactcagagaagatcttctccatctgcgtcatgctcattggctccctcatgtatgctagcatcttcggcaacgtgtcggccatcatccagcggctgtactcgggcacagcccgctaccacacacagatgctgcgggtgcgggagttcatccgcttccaccagatccccaatcccctgcgccagcgcctcgaggagtacttccagcacgcctggtcctacaccaacggcatcgacatgaacgcggtgctgaagggcttccctgagtgcctgcaggctgacatctgcctgcacctgaaccgctcactgctgcagcactgcaaacccttccgaggggccaccaagggctgccttcgggccctggccatgaagttcaagaccacacatgcaccgccaggggacacactggtgcatgctggggacctgctcaccgccctgtacttcatctcccggggctccatcgagatcctgcggggcgacgtcgtcgtggccatcctggggaagaatgacatctttggggagcctctgaacctgtatgcaaggcctggcaagtcgaacggggatgtgcgggccctcacctactgtgacctacacaagatccatcgggacgacctgctggaggtgctggacatgtaccctgagttctccgaccacttctggtccagcctggagatcaccttcaacctgcgagataccaacatgatcccgggctcccccggcagtacggagttagagggtggcttcagtcggcaacgcaagcgcaagttgtccttccgcaggcgcacggacaaggacacggagcagccaggggaggtgtcggccttggggccgggccgggcgggggcagggccgagtagccggggccggccgggggggccgtggggggagagcccgtccagtggcccctccagccctgagagcagtgaggatgagggcccaggccgcagctccagccccctccgcctggtgcccttctccagccccaggccccccggagagccgccgggtggggagcccctgatggaggactgcgagaagagcagcgacacttgcaaccccctgtcaggcgccttctcaggagtgtccaacattttcagcttctggggggacagtcggggccgccagtaccaggagctccctcgatgccccgcccccacccccagcctcctcaacatccccctctccagcccgggtcggcggccccggggcgacgtggagagcaggctggatgccctccagcgccagctcaacaggctggagacccggctgagtgcagacatggccactgtcctgcagctgctacagaggcagatgacgctggtcccgcccgcctacagtgctgtgaccaccccggggcctggccccacttccacatccccgctgttgcccgtcagccccctccccaccctcaccttggactcgctttctcaggtttcccagttcatggcgtgtgaggagctgcccccgggggccccagagcttccccaagaaggccccacacgacgcctctccctaccgggccagctgggggccctcacctcccagcccctgcacagacacggctcggacccgggcagttagtggggctgcccagtgtggacacgtggctcacccagggatcaaggcgctgctgggccgctccccttggaggccctgctcaggaggccctgaccgtggaaggggagaggaactcgaaagcacagctcctcccccagcccttgggaccatcttctcctgcagtcccctgggccccagtgagaggggcaggggcagggccggcagtaggtggggcctgtggtccccccactgccctgagggcattagctggtctaactgcccggaggcacccggccctgggccttaggcacctcaaggacttttctgctatttactgctcttattgttaaggataataattaaggatcatatgaataattaatgaagatgctgatgactatgaataataaataattatcctgaggaga

SEQ ID NO: 886 - DNA, 3884 bp, Homo sapiens
  source 1..3884: mol_type = genomic DNA
  misc_feature 1..3884: note = cDNA of KCNH2 gene SNP c.421C>T (p.Pro141Ser)
atgccggtgcggaggggccacgtcgcgccgcagaacaccttcctggacaccatcatccgcaagtttgagggccagagccgtaagttcatcatcgccaacgctcgggtggagaactgcgccgtcatctactgcaacgacggcttctgcgagctgtgcggctactcgcgggccgaggtgatgcagcgaccctgcacctgcgacttcctgcacgggccgcgcacgcagcgccgcgctgccgcgcagatcgcgcaggcactgctgggcgccgaggagcgcaaagtggaaatcgccttctaccggaaagatgggagctgcttcctatgtctggtggatgtggtgcccgtgaagaacgaggatggggctgtcatcatgttcatcctcaatttcgaggtggtgatggagaaggacatggtggggtcctcggctcatgacaccaaccaccggggcccccccaccagctggctggccccaggccgcgccaagaccttccgcctgaagctgcccgcgctgctggcgctgacggcccgggagtcgtcggtgcggtcgggcggcgcgggcggcgcgggcgccccgggggccgtggtggtggacgtggacctgacgcccgcggcacccagcagcgagtcgctggccctggacgaagtgacagccatggacaaccacgtggcagggctcgggcccgcggaggagcggcgtgcgctggtgggtcccggctctccgccccgcagcgcgcccggccagctcccatcgccccgggcgcacagcctcaaccccgacgcctcgggctccagctgcagcctggcccggacgcgctcccgagaaagctgcgccagcgtgcgccgcgcctcgtcggccgacgacatcgaggccatgcgcgccggggtgctgcccccgccaccgcgccacgccagcaccggggccatgcacccactgcgcagcggcttgctcaactccacctcggactccgacctcgtgcgctaccgcaccattagcaagattccccaaatcaccctcaactttgtggacctcaagggcgaccccttcttggcttcgcccaccagtgaccgtgagatcatagcacctaagataaaggagcgaacccacaatgtcactgagaaggtcacccaggtcctgtccctgggcgccgacgtgctgcctgagtacaagctgcaggcaccgcgcatccaccgctggaccatcctgcattacagccccttcaaggccgtgtgggactggctcatcctgctgctggtcatctacacggctgtcttcacaccctactcggctgccttcctgctgaaggagacggaagaaggcccgcctgctaccgagtgtggctacgcctgccagccgctggctgtggtggacctcatcgtggacatcatgttcattgtggacatcctcatcaacttccgcaccacctacgtcaatgccaacgaggaggtggtcagccaccccggccgcatcgccgtccactacttcaagggctggttcctcatcgacatggtggccgccatccccttcgacctgctcatcttcggctctggctctgaggagctgatcgggctgctgaagactgcgcggctgctgcggctggtgcgcgtggcgcggaagctggatcgctactcagagtacggcgcggccgtgctgttcttgctcatgtgcacctttgcgctcatcgcgcactggctagcctgcatctggtacgccatcggcaacatggagcagccacacatggactcacgcatcggctggctgcacaacctgggcgaccagataggcaaaccctacaacagcagcggcctgggcggcccctccatcaaggacaagtatgtgacggcgctctacttcaccttcagcagcctcaccagtgtgggcttcggcaacgtctctcccaacaccaactcagagaagatcttctccatctgcgtcatgctcattggctccctcatgtatgctagcatcttcggcaacgtgtcggccatcatccagcggctgtactcgggcacagcccgctaccacacacagatgctgcgggtgcgggagttcatccgcttccaccagatccccaatcccctgcgccagcgcctcgaggagtacttccagcacgcctggtcctacaccaacggcatcgacatgaacgcggtgctgaagggcttccctgagtgcctgcaggctgacatctgcctgcacctgaaccgctcactgctgcagcactgcaaacccttccgaggggccaccaagggctgccttcgggccctggccatgaagttcaagaccacacatgcaccgccaggggacacactggtgcatgctggggacctgctcaccgccctgtacttcatctcccggggctccatcgagatcctgcggggcgacgtcgtcgtggccatcctggggaagaatgacatctttggggagcctctgaacctgtatgcaaggcctggcaagtcgaacggggatgtgcgggccctcacctactgtgacctacacaagatccatcgggacgacctgctggaggtgctggacatgtaccctgagttctccgaccacttctggtccagcctggagatcaccttcaacctgcgagataccaacatgatcccgggctcccccggcagtacggagttagagggtggcttcagtcggcaacgcaagcgcaagttgtccttccgcaggcgcacggacaaggacacggagcagccaggggaggtgtcggccttggggccgggccgggcgggggcagggccgagtagccggggccggccgggggggccgtggggggagagcccgtccagtggcccctccagccctgagagcagtgaggatgagggcccaggccgcagctccagccccctccgcctggtgcccttctccagccccaggccccccggagagccgccgggtggggagcccctgatggaggactgcgagaagagcagcgacacttgcaaccccctgtcaggcgccttctcaggagtgtccaacattttcagcttctggggggacagtcggggccgccagtaccaggagctccctcgatgccccgcccccacccccagcctcctcaacatccccctctccagcccgggtcggcggccccggggcgacgtggagagcaggctggatgccctccagcgccagctcaacaggctggagacccggctgagtgcagacatggccactgtcctgcagctgctacagaggcagatgacgctggtcccgcccgcctacagtgctgtgaccaccccggggcctggccccacttccacatccccgctgttgcccgtcagccccctccccaccctcaccttggactcgctttctcaggtttcccagttcatggcgtgtgaggagctgcccccgggggccccagagcttccccaagaaggccccacacgacgcctctccctaccgggccagctgggggccctcacctcccagcccctgcacagacacggctcggacccgggcagttagtggggctgcccagtgtggacacgtggctcacccagggatcaaggcgctgctgggccgctccccttggaggccctgctcaggaggccctgaccgtggaaggggagaggaactcgaaagcacagctcctcccccagcccttgggaccatcttctcctgcagtcccctgggccccagtgagaggggcaggggcagggccggcagtaggtggggcctgtggtccccccactgccctgagggcattagctggtctaactgcccggaggcacccggccctgggccttaggcacctcaaggacttttctgctatttactgctcttattgttaaggataataattaaggatcatatgaataattaatgaagatgctgatgactatgaataataaataattatcctgaggaga

SEQ ID NO: 887 - DNA, 3884 bp, Homo sapiens
  source 1..3884: mol_type = genomic DNA
  misc_feature 1..3884: note = cDNA of KCNH2 gene SNP c.422C>T (p.Pro141Leu)
atgccggtgcggaggggccacgtcgcgccgcagaacaccttcctggacaccatcatccgcaagtttgagggccagagccgtaagttcatcatcgccaacgctcgggtggagaactgcgccgtcatctactgcaacgacggcttctgcgagctgtgcggctactcgcgggccgaggtgatgcagcgaccctgcacctgcgacttcctgcacgggccgcgcacgcagcgccgcgctgccgcgcagatcgcgcaggcactgctgggcgccgaggagcgcaaagtggaaatcgccttctaccggaaagatgggagctgcttcctatgtctggtggatgtggtgcccgtgaagaacgaggatggggctgtcatcatgttcatcctcaatttcgaggtggtgatggagaaggacatggtggggtccctggctcatgacaccaaccaccggggcccccccaccagctggctggccccaggccgcgccaagaccttccgcctgaagctgcccgcgctgctggcgctgacggcccgggagtcgtcggtgcggtcgggcggcgcgggcggcgcgggcgccccgggggccgtggtggtggacgtggacctgacgcccgcggcacccagcagcgagtcgctggccctggacgaagtgacagccatggacaaccacgtggcagggctcgggcccgcggaggagcggcgtgcgctggtgggtcccggctctccgccccgcagcgcgcccggccagctcccatcgccccgggcgcacagcctcaaccccgacgcctcgggctccagctgcagcctggcccggacgcgctcccgagaaagctgcgccagcgtgcgccgcgcctcgtcggccgacgacatcgaggccatgcgcgccggggtgctgcccccgccaccgcgccacgccagcaccggggccatgcacccactgcgcagcggcttgctcaactccacctcggactccgacctcgtgcgctaccgcaccattagcaagattccccaaatcaccctcaactttgtggacctcaagggcgaccccttcttggcttcgcccaccagtgaccgtgagatcatagcacctaagataaaggagcgaacccacaatgtcactgagaaggtcacccaggtcctgtccctgggcgccgacgtgctgcctgagtacaagctgcaggcaccgcgcatccaccgctggaccatcctgcattacagccccttcaaggccgtgtgggactggctcatcctgctgctggtcatctacacggctgtcttcacaccctactcggctgccttcctgctgaaggagacggaagaaggcccgcctgctaccgagtgtggctacgcctgccagccgctggctgtggtggacctcatcgtggacatcatgttcattgtggacatcctcatcaacttccgcaccacctacgtcaatgccaacgaggaggtggtcagccaccccggccgcatcgccgtccactacttcaagggctggttcctcatcgacatggtggccgccatccccttcgacctgctcatcttcggctctggctctgaggagctgatcgggctgctgaagactgcgcggctgctgcggctggtgcgcgtggcgcggaagctggatcgctactcagagtacggcgcggccgtgctgttcttgctcatgtgcacctttgcgctcatcgcgcactggctagcctgcatctggtacgccatcggcaacatggagcagccacacatggactcacgcatcggctggctgcacaacctgggcgaccagataggcaaaccctacaacagcagcggcctgggcggcccctccatcaaggacaagtatgtgacggcgctctacttcaccttcagcagcctcaccagtgtgggcttcggcaacgtctctcccaacaccaactcagagaagatcttctccatctgcgtcatgctcattggctccctcatgtatgctagcatcttcggcaacgtgtcggccatcatccagcggctgtactcgggcacagcccgctaccacacacagatgctgcgggtgcgggagttcatccgcttccaccagatccccaatcccctgcgccagcgcctcgaggagtacttccagcacgcctggtcctacaccaacggcatcgacatgaacgcggtgctgaagggcttccctgagtgcctgcaggctgacatctgcctgcacctgaaccgctcactgctgcagcactgcaaacccttccgaggggccaccaagggctgccttcgggccctggccatgaagttcaagaccacacatgcaccgccaggggacacactggtgcatgctggggacctgctcaccgccctgtacttcatctcccggggctccatcgagatcctgcggggcgacgtcgtcgtggccatcctggggaagaatgacatctttggggagcctctgaacctgtatgcaaggcctggcaagtcgaacggggatgtgcgggccctcacctactgtgacctacacaagatccatcgggacgacctgctggaggtgctggacatgtaccctgagttctccgaccacttctggtccagcctggagatcaccttcaacctgcgagataccaacatgatcccgggctcccccggcagtacggagttagagggtggcttcagtcggcaacgcaagcgcaagttgtccttccgcaggcgcacggacaaggacacggagcagccaggggaggtgtcggccttggggccgggccgggcgggggcagggccgagtagccggggccggccgggggggccgtggggggagagcccgtccagtggcccctccagccctgagagcagtgaggatgagggcccaggccgcagctccagccccctccgcctggtgcccttctccagccccaggccccccggagagccgccgggtggggagcccctgatggaggactgcgagaagagcagcgacacttgcaaccccctgtcaggcgccttctcaggagtgtccaacattttcagcttctggggggacagtcggggccgccagtaccaggagctccctcgatgccccgcccccacccccagcctcctcaacatccccctctccagcccgggtcggcggccccggggcgacgtggagagcaggctggatgccctccagcgccagctcaacaggctggagacccggctgagtgcagacatggccactgtcctgcagctgctacagaggcagatgacgctggtcccgcccgcctacagtgctgtgaccaccccggggcctggccccacttccacatccccgctgttgcccgtcagccccctccccaccctcaccttggactcgctttctcaggtttcccagttcatggcgtgtgaggagctgcccccgggggccccagagcttccccaagaaggccccacacgacgcctctccctaccgggccagctgggggccctcacctcccagcccctgcacagacacggctcggacccgggcagttagtggggctgcccagtgtggacacgtggctcacccagggatcaaggcgctgctgggccgctccccttggaggccctgctcaggaggccctgaccgtggaaggggagaggaactcgaaagcacagctcctcccccagcccttgggaccatcttctcctgcagtcccctgggccccagtgagaggggcaggggcagggccggcagtaggtggggcctgtggtccccccactgccctgagggcattagctggtctaactgcccggaggcacccggccctgggccttaggcacctcaaggacttttctgctatttactgctcttattgttaaggataataattaaggatcatatgaataattaatgaagatgctgatgactatgaataataaataattatcctgaggaga

SEQ ID NO: 888 - DNA, 3884 bp, Homo sapiens
  source 1..3884: mol_type = genomic DNA
  misc_feature 1..3884: note = cDNA of KCNH2 gene SNP c.424G>A (p.Ala142Thr)
atgccggtgcggaggggccacgtcgcgccgcagaacaccttcctggacaccatcatccgcaagtttgagggccagagccgtaagttcatcatcgccaacgctcgggtggagaactgcgccgtcatctactgcaacgacggcttctgcgagctgtgcggctactcgcgggccgaggtgatgcagcgaccctgcacctgcgacttcctgcacgggccgcgcacgcagcgccgcgctgccgcgcagatcgcgcaggcactgctgggcgccgaggagcgcaaagtggaaatcgccttctaccggaaagatgggagctgcttcctatgtctggtggatgtggtgcccgtgaagaacgaggatggggctgtcatcatgttcatcctcaatttcgaggtggtgatggagaaggacatggtggggtccccgactcatgacaccaaccaccggggcccccccaccagctggctggccccaggccgcgccaagaccttccgcctgaagctgcccgcgctgctggcgctgacggcccgggagtcgtcggtgcggtcgggcggcgcgggcggcgcgggcgccccgggggccgtggtggtggacgtggacctgacgcccgcggcacccagcagcgagtcgctggccctggacgaagtgacagccatggacaaccacgtggcagggctcgggcccgcggaggagcggcgtgcgctggtgggtcccggctctccgccccgcagcgcgcccggccagctcccatcgccccgggcgcacagcctcaaccccgacgcctcgggctccagctgcagcctggcccggacgcgctcccgagaaagctgcgccagcgtgcgccgcgcctcgtcggccgacgacatcgaggccatgcgcgccggggtgctgcccccgccaccgcgccacgccagcaccggggccatgcacccactgcgcagcggcttgctcaactccacctcggactccgacctcgtgcgctaccgcaccattagcaagattccccaaatcaccctcaactttgtggacctcaagggcgaccccttcttggcttcgcccaccagtgaccgtgagatcatagcacctaagataaaggagcgaacccacaatgtcactgagaaggtcacccaggtcctgtccctgggcgccgacgtgctgcctgagtacaagctgcaggcaccgcgcatccaccgctggaccatcctgcattacagccccttcaaggccgtgtgggactggctcatcctgctgctggtcatctacacggctgtcttcacaccctactcggctgccttcctgctgaaggagacggaagaaggcccgcctgctaccgagtgtggctacgcctgccagccgctggctgtggtggacctcatcgtggacatcatgttcattgtggacatcctcatcaacttccgcaccacctacgtcaatgccaacgaggaggtggtcagccaccccggccgcatcgccgtccactacttcaagggctggttcctcatcgacatggtggccgccatccccttcgacctgctcatcttcggctctggctctgaggagctgatcgggctgctgaagactgcgcggctgctgcggctggtgcgcgtggcgcggaagctggatcgctactcagagtacggcgcggccgtgctgttcttgctcatgtgcacctttgcgctcatcgcgcactggctagcctgcatctggtacgccatcggcaacatggagcagccacacatggactcacgcatcggctggctgcacaacctgggcgaccagataggcaaaccctacaacagcagcggcctgggcggcccctccatcaaggacaagtatgtgacggcgctctacttcaccttcagcagcctcaccagtgtgggcttcggcaacgtctctcccaacaccaactcagagaagatcttctccatctgcgtcatgctcattggctccctcatgtatgctagcatcttcggcaacgtgtcggccatcatccagcggctgtactcgggcacagcccgctaccacacacagatgctgcgggtgcgggagttcatccgcttccaccagatccccaatcccctgcgccagcgcctcgaggagtacttccagcacgcctggtcctacaccaacggcatcgacatgaacgcggtgctgaagggcttccctgagtgcctgcaggctgacatctgcctgcacctgaaccgctcactgctgcagcactgcaaacccttccgaggggccaccaagggctgccttcgggccctggccatgaagttcaagaccacacatgcaccgccaggggacacactggtgcatgctggggacctgctcaccgccctgtacttcatctcccggggctccatcgagatcctgcggggcgacgtcgtcgtggccatcctggggaagaatgacatctttggggagcctctgaacctgtatgcaaggcctggcaagtcgaacggggatgtgcgggccctcacctactgtgacctacacaagatccatcgggacgacctgctggaggtgctggacatgtaccctgagttctccgaccacttctggtccagcctggagatcaccttcaacctgcgagataccaacatgatcccgggctcccccggcagtacggagttagagggtggcttcagtcggcaacgcaagcgcaagttgtccttccgcaggcgcacggacaaggacacggagcagccaggggaggtgtcggccttggggccgggccgggcgggggcagggccgagtagccggggccggccgggggggccgtggggggagagcccgtccagtggcccctccagccctgagagcagtgaggatgagggcccaggccgcagctccagccccctccgcctggtgcccttctccagccccaggccccccggagagccgccgggtggggagcccctgatggaggactgcgagaagagcagcgacacttgcaaccccctgtcaggcgccttctcaggagtgtccaacattttcagcttctggggggacagtcggggccgccagtaccaggagctccctcgatgccccgcccccacccccagcctcctcaacatccccctctccagcccgggtcggcggccccggggcgacgtggagagcaggctggatgccctccagcgccagctcaacaggctggagacccggctgagtgcagacatggccactgtcctgcagctgctacagaggcagatgacgctggtcccgcccgcctacagtgctgtgaccaccccggggcctggccccacttccacatccccgctgttgcccgtcagccccctccccaccctcaccttggactcgctttctcaggtttcccagttcatggcgtgtgaggagctgcccccgggggccccagagcttccccaagaaggccccacacgacgcctctccctaccgggccagctgggggccctcacctcccagcccctgcacagacacggctcggacccgggcagttagtggggctgcccagtgtggacacgtggctcacccagggatcaaggcgctgctgggccgctccccttggaggccctgctcaggaggccctgaccgtggaaggggagaggaactcgaaagcacagctcctcccccagcccttgggaccatcttctcctgcagtcccctgggccccagtgagaggggcaggggcagggccggcagtaggtggggcctgtggtccccccactgccctgagggcattagctggtctaactgcccggaggcacccggccctgggccttaggcacctcaaggacttttctgctatttactgctcttattgttaaggataataattaaggatcatatgaataattaatgaagatgctgatgactatgaataataaataattatcctgaggaga

SEQ ID NO: 889 - DNA, 3884 bp, Homo sapiens
  source 1..3884: mol_type = genomic DNA
  misc_feature 1..3884: note = cDNA of KCNH2 gene SNP c.431A>T (p.Asp144Val)
atgccggtgcggaggggccacgtcgcgccgcagaacaccttcctggacaccatcatccgcaagtttgagggccagagccgtaagttcatcatcgccaacgctcgggtggagaactgcgccgtcatctactgcaacgacggcttctgcgagctgtgcggctactcgcgggccgaggtgatgcagcgaccctgcacctgcgacttcctgcacgggccgcgcacgcagcgccgcgctgccgcgcagatcgcgcaggcactgctgggcgccgaggagcgcaaagtggaaatcgccttctaccggaaagatgggagctgcttcctatgtctggtggatgtggtgcccgtgaagaacgaggatggggctgtcatcatgttcatcctcaatttcgaggtggtgatggagaaggacatggtggggtccccggctcatgtcaccaaccaccggggcccccccaccagctggctggccccaggccgcgccaagaccttccgcctgaagctgcccgcgctgctggcgctgacggcccgggagtcgtcggtgcggtcgggcggcgcgggcggcgcgggcgccccgggggccgtggtggtggacgtggacctgacgcccgcggcacccagcagcgagtcgctggccctggacgaagtgacagccatggacaaccacgtggcagggctcgggcccgcggaggagcggcgtgcgctggtgggtcccggctctccgccccgcagcgcgcccggccagctcccatcgccccgggcgcacagcctcaaccccgacgcctcgggctccagctgcagcctggcccggacgcgctcccgagaaagctgcgccagcgtgcgccgcgcctcgtcggccgacgacatcgaggccatgcgcgccggggtgctgcccccgccaccgcgccacgccagcaccggggccatgcacccactgcgcagcggcttgctcaactccacctcggactccgacctcgtgcgctaccgcaccattagcaagattccccaaatcaccctcaactttgtggacctcaagggcgaccccttcttggcttcgcccaccagtgaccgtgagatcatagcacctaagataaaggagcgaacccacaatgtcactgagaaggtcacccaggtcctgtccctgggcgccgacgtgctgcctgagtacaagctgcaggcaccgcgcatccaccgctggaccatcctgcattacagccccttcaaggccgtgtgggactggctcatcctgctgctggtcatctacacggctgtcttcacaccctactcggctgccttcctgctgaaggagacggaagaaggcccgcctgctaccgagtgtggctacgcctgccagccgctggctgtggtggacctcatcgtggacatcatgttcattgtggacatcctcatcaacttccgcaccacctacgtcaatgccaacgaggaggtggtcagccaccccggccgcatcgccgtccactacttcaagggctggttcctcatcgacatggtggccgccatccccttcgacctgctcatcttcggctctggctctgaggagctgatcgggctgctgaagactgcgcggctgctgcggctggtgcgcgtggcgcggaagctggatcgctactcagagtacggcgcggccgtgctgttcttgctcatgtgcacctttgcgctcatcgcgcactggctagcctgcatctggtacgccatcggcaacatggagcagccacacatggactcacgcatcggctggctgcacaacctgggcgaccagataggcaaaccctacaacagcagcggcctgggcggcccctccatcaaggacaagtatgtgacggcgctctacttcaccttcagcagcctcaccagtgtgggcttcggcaacgtctctcccaacaccaactcagagaagatcttctccatctgcgtcatgctcattggctccctcatgtatgctagcatcttcggcaacgtgtcggccatcatccagcggctgtactcgggcacagcccgctaccacacacagatgctgcgggtgcgggagttcatccgcttccaccagatccccaatcccctgcgccagcgcctcgaggagtacttccagcacgcctggtcctacaccaacggcatcgacatgaacgcggtgctgaagggcttccctgagtgcctgcaggctgacatctgcctgcacctgaaccgctcactgctgcagcactgcaaacccttccgaggggccaccaagggctgccttcgggccctggccatgaagttcaagaccacacatgcaccgccaggggacacactggtgcatgctggggacctgctcaccgccctgtacttcatctcccggggctccatcgagatcctgcggggcgacgtcgtcgtggccatcctggggaagaatgacatctttggggagcctctgaacctgtatgcaaggcctggcaagtcgaacggggatgtgcgggccctcacctactgtgacctacacaagatccatcgggacgacctgctggaggtgctggacatgtaccctgagttctccgaccacttctggtccagcctggagatcaccttcaacctgcgagataccaacatgatcccgggctcccccggcagtacggagttagagggtggcttcagtcggcaacgcaagcgcaagttgtccttccgcaggcgcacggacaaggacacggagcagccaggggaggtgtcggccttggggccgggccgggcgggggcagggccgagtagccggggccggccgggggggccgtggggggagagcccgtccagtggcccctccagccctgagagcagtgaggatgagggcccaggccgcagctccagccccctccgcctggtgcccttctccagccccaggccccccggagagccgccgggtggggagcccctgatggaggactgcgagaagagcagcgacacttgcaaccccctgtcaggcgccttctcaggagtgtccaacattttcagcttctggggggacagtcggggccgccagtaccaggagctccctcgatgccccgcccccacccccagcctcctcaacatccccctctccagcccgggtcggcggccccggggcgacgtggagagcaggctggatgccctccagcgccagctcaacaggctggagacccggctgagtgcagacatggccactgtcctgcagctgctacagaggcagatgacgctggtcccgcccgcctacagtgctgtgaccaccccggggcctggccccacttccacatccccgctgttgcccgtcagccccctccccaccctcaccttggactcgctttctcaggtttcccagttcatggcgtgtgaggagctgcccccgggggccccagagcttccccaagaaggccccacacgacgcctctccctaccgggccagctgggggccctcacctcccagcccctgcacagacacggctcggacccgggcagttagtggggctgcccagtgtggacacgtggctcacccagggatcaaggcgctgctgggccgctccccttggaggccctgctcaggaggccctgaccgtggaaggggagaggaactcgaaagcacagctcctcccccagcccttgggaccatcttctcctgcagtcccctgggccccagtgagaggggcaggggcagggccggcagtaggtggggcctgtggtccccccactgccctgagggcattagctggtctaactgcccggaggcacccggccctgggccttaggcacctcaaggacttttctgctatttactgctcttattgttaaggataataattaaggatcatatgaataattaatgaagatgctgatgactatgaataataaataattatcctgaggaga

SEQ ID NO: 890 - DNA, 3884 bp, Homo sapiens
  source 1..3884: mol_type = genomic DNA
  misc_feature 1..3884: note = cDNA of KCNH2 gene SNP c.434C>T (p.Thr145Ile)
atgccggtgcggaggggccacgtcgcgccgcagaacaccttcctggacaccatcatccgcaagtttgagggccagagccgtaagttcatcatcgccaacgctcgggtggagaactgcgccgtcatctactgcaacgacggcttctgcgagctgtgcggctactcgcgggccgaggtgatgcagcgaccctgcacctgcgacttcctgcacgggccgcgcacgcagcgccgcgctgccgcgcagatcgcgcaggcactgctgggcgccgaggagcgcaaagtggaaatcgccttctaccggaaagatgggagctgcttcctatgtctggtggatgtggtgcccgtgaagaacgaggatggggctgtcatcatgttcatcctcaatttcgaggtggtgatggagaaggacatggtggggtccccggctcatgacatcaaccaccggggcccccccaccagctggctggccccaggccgcgccaagaccttccgcctgaagctgcccgcgctgctggcgctgacggcccgggagtcgtcggtgcggtcgggcggcgcgggcggcgcgggcgccccgggggccgtggtggtggacgtggacctgacgcccgcggcacccagcagcgagtcgctggccctggacgaagtgacagccatggacaaccacgtggcagggctcgggcccgcggaggagcggcgtgcgctggtgggtcccggctctccgccccgcagcgcgcccggccagctcccatcgccccgggcgcacagcctcaaccccgacgcctcgggctccagctgcagcctggcccggacgcgctcccgagaaagctgcgccagcgtgcgccgcgcctcgtcggccgacgacatcgaggccatgcgcgccggggtgctgcccccgccaccgcgccacgccagcaccggggccatgcacccactgcgcagcggcttgctcaactccacctcggactccgacctcgtgcgctaccgcaccattagcaagattccccaaatcaccctcaactttgtggacctcaagggcgaccccttcttggcttcgcccaccagtgaccgtgagatcatagcacctaagataaaggagcgaacccacaatgtcactgagaaggtcacccaggtcctgtccctgggcgccgacgtgctgcctgagtacaagctgcaggcaccgcgcatccaccgctggaccatcctgcattacagccccttcaaggccgtgtgggactggctcatcctgctgctggtcatctacacggctgtcttcacaccctactcggctgccttcctgctgaaggagacggaagaaggcccgcctgctaccgagtgtggctacgcctgccagccgctggctgtggtggacctcatcgtggacatcatgttcattgtggacatcctcatcaacttccgcaccacctacgtcaatgccaacgaggaggtggtcagccaccccggccgcatcgccgtccactacttcaagggctggttcctcatcgacatggtggccgccatccccttcgacctgctcatcttcggctctggctctgaggagctgatcgggctgctgaagactgcgcggctgctgcggctggtgcgcgtggcgcggaagctggatcgctactcagagtacggcgcggccgtgctgttcttgctcatgtgcacctttgcgctcatcgcgcactggctagcctgcatctggtacgccatcggcaacatggagcagccacacatggactcacgcatcggctggctgcacaacctgggcgaccagataggcaaaccctacaacagcagcggcctgggcggcccctccatcaaggacaagtatgtgacggcgctctacttcaccttcagcagcctcaccagtgtgggcttcggcaacgtctctcccaacaccaactcagagaagatcttctccatctgcgtcatgctcattggctccctcatgtatgctagcatcttcggcaacgtgtcggccatcatccagcggctgtactcgggcacagcccgctaccacacacagatgctgcgggtgcgggagttcatccgcttccaccagatccccaatcccctgcgccagcgcctcgaggagtacttccagcacgcctggtcctacaccaacggcatcgacatgaacgcggtgctgaagggcttccctgagtgcctgcaggctgacatctgcctgcacctgaaccgctcactgctgcagcactgcaaacccttccgaggggccaccaagggctgccttcgggccctggccatgaagttcaagaccacacatgcaccgccaggggacacactggtgcatgctggggacctgctcaccgccctgtacttcatctcccggggctccatcgagatcctgcggggcgacgtcgtcgtggccatcctggggaagaatgacatctttggggagcctctgaacctgtatgcaaggcctggcaagtcgaacggggatgtgcgggccctcacctactgtgacctacacaagatccatcgggacgacctgctggaggtgctggacatgtaccctgagttctccgaccacttctggtccagcctggagatcaccttcaacctgcgagataccaacatgatcccgggctcccccggcagtacggagttagagggtggcttcagtcggcaacgcaagcgcaagttgtccttccgcaggcgcacggacaaggacacggagcagccaggggaggtgtcggccttggggccgggccgggcgggggcagggccgagtagccggggccggccgggggggccgtggggggagagcccgtccagtggcccctccagccctgagagcagtgaggatgagggcccaggccgcagctccagccccctccgcctggtgcccttctccagccccaggccccccggagagccgccgggtggggagcccctgatggaggactgcgagaagagcagcgacacttgcaaccccctgtcaggcgccttctcaggagtgtccaacattttcagcttctggggggacagtcggggccgccagtaccaggagctccctcgatgccccgcccccacccccagcctcctcaacatccccctctccagcccgggtcggcggccccggggcgacgtggagagcaggctggatgccctccagcgccagctcaacaggctggagacccggctgagtgcagacatggccactgtcctgcagctgctacagaggcagatgacgctggtcccgcccgcctacagtgctgtgaccaccccggggcctggccccacttccacatccccgctgttgcccgtcagccccctccccaccctcaccttggactcgctttctcaggtttcccagttcatggcgtgtgaggagctgcccccgggggccccagagcttccccaagaaggccccacacgacgcctctccctaccgggccagctgggggccctcacctcccagcccctgcacagacacggctcggacccgggcagttagtggggctgcccagtgtggacacgtggctcacccagggatcaaggcgctgctgggccgctccccttggaggccctgctcaggaggccctgaccgtggaaggggagaggaactcgaaagcacagctcctcccccagcccttgggaccatcttctcctgcagtcccctgggccccagtgagaggggcaggggcagggccggcagtaggtggggcctgtggtccccccactgccctgagggcattagctggtctaactgcccggaggcacccggccctgggccttaggcacctcaaggacttttctgctatttactgctcttattgttaaggataataattaaggatcatatgaataattaatgaagatgctgatgactatgaataataaataattatcctgaggaga

SEQ ID NO: 891 - DNA, 3884 bp, Homo sapiens
  source 1..3884: mol_type = genomic DNA
  misc_feature 1..3884: note = cDNA of KCNH2 gene SNP c.440A>G (p.His147Arg)
atgccggtgcggaggggccacgtcgcgccgcagaacaccttcctggacaccatcatccgcaagtttgagggccagagccgtaagttcatcatcgccaacgctcgggtggagaactgcgccgtcatctactgcaacgacggcttctgcgagctgtgcggctactcgcgggccgaggtgatgcagcgaccctgcacctgcgacttcctgcacgggccgcgcacgcagcgccgcgctgccgcgcagatcgcgcaggcactgctgggcgccgaggagcgcaaagtggaaatcgccttctaccggaaagatgggagctgcttcctatgtctggtggatgtggtgcccgtgaagaacgaggatggggctgtcatcatgttcatcctcaatttcgaggtggtgatggagaaggacatggtggggtccccggctcatgacaccaaccgccggggcccccccaccagctggctggccccaggccgcgccaagaccttccgcctgaagctgcccgcgctgctggcgctgacggcccgggagtcgtcggtgcggtcgggcggcgcgggcggcgcgggcgccccgggggccgtggtggtggacgtggacctgacgcccgcggcacccagcagcgagtcgctggccctggacgaagtgacagccatggacaaccacgtggcagggctcgggcccgcggaggagcggcgtgcgctggtgggtcccggctctccgccccgcagcgcgcccggccagctcccatcgccccgggcgcacagcctcaaccccgacgcctcgggctccagctgcagcctggcccggacgcgctcccgagaaagctgcgccagcgtgcgccgcgcctcgtcggccgacgacatcgaggccatgcgcgccggggtgctgcccccgccaccgcgccacgccagcaccggggccatgcacccactgcgcagcggcttgctcaactccacctcggactccgacctcgtgcgctaccgcaccattagcaagattccccaaatcaccctcaactttgtggacctcaagggcgaccccttcttggcttcgcccaccagtgaccgtgagatcatagcacctaagataaaggagcgaacccacaatgtcactgagaaggtcacccaggtcctgtccctgggcgccgacgtgctgcctgagtacaagctgcaggcaccgcgcatccaccgctggaccatcctgcattacagccccttcaaggccgtgtgggactggctcatcctgctgctggtcatctacacggctgtcttcacaccctactcggctgccttcctgctgaaggagacggaagaaggcccgcctgctaccgagtgtggctacgcctgccagccgctggctgtggtggacctcatcgtggacatcatgttcattgtggacatcctcatcaacttccgcaccacctacgtcaatgccaacgaggaggtggtcagccaccccggccgcatcgccgtccactacttcaagggctggttcctcatcgacatggtggccgccatccccttcgacctgctcatcttcggctctggctctgaggagctgatcgggctgctgaagactgcgcggctgctgcggctggtgcgcgtggcgcggaagctggatcgctactcagagtacggcgcggccgtgctgttcttgctcatgtgcacctttgcgctcatcgcgcactggctagcctgcatctggtacgccatcggcaacatggagcagccacacatggactcacgcatcggctggctgcacaacctgggcgaccagataggcaaaccctacaacagcagcggcctgggcggcccctccatcaaggacaagtatgtgacggcgctctacttcaccttcagcagcctcaccagtgtgggcttcggcaacgtctctcccaacaccaactcagagaagatcttctccatctgcgtcatgctcattggctccctcatgtatgctagcatcttcggcaacgtgtcggccatcatccagcggctgtactcgggcacagcccgctaccacacacagatgctgcgggtgcgggagttcatccgcttccaccagatccccaatcccctgcgccagcgcctcgaggagtacttccagcacgcctggtcctacaccaacggcatcgacatgaacgcggtgctgaagggcttccctgagtgcctgcaggctgacatctgcctgcacctgaaccgctcactgctgcagcactgcaaacccttccgaggggccaccaagggctgccttcgggccctggccatgaagttcaagaccacacatgcaccgccaggggacacactggtgcatgctggggacctgctcaccgccctgtacttcatctcccggggctccatcgagatcctgcggggcgacgtcgtcgtggccatcctggggaagaatgacatctttggggagcctctgaacctgtatgcaaggcctggcaagtcgaacggggatgtgcgggccctcacctactgtgacctacacaagatccatcgggacgacctgctggaggtgctggacatgtaccctgagttctccgaccacttctggtccagcctggagatcaccttcaacctgcgagataccaacatgatcccgggctcccccggcagtacggagttagagggtggcttcagtcggcaacgcaagcgcaagttgtccttccgcaggcgcacggacaaggacacggagcagccaggggaggtgtcggccttggggccgggccgggcgggggcagggccgagtagccggggccggccgggggggccgtggggggagagcccgtccagtggcccctccagccctgagagcagtgaggatgagggcccaggccgcagctccagccccctccgcctggtgcccttctccagccccaggccccccggagagccgccgggtggggagcccctgatggaggactgcgagaagagcagcgacacttgcaaccccctgtcaggcgccttctcaggagtgtccaacattttcagcttctggggggacagtcggggccgccagtaccaggagctccctcgatgccccgcccccacccccagcctcctcaacatccccctctccagcccgggtcggcggccccggggcgacgtggagagcaggctggatgccctccagcgccagctcaacaggctggagacccggctgagtgcagacatggccactgtcctgcagctgctacagaggcagatgacgctggtcccgcccgcctacagtgctgtgaccaccccggggcctggccccacttccacatccccgctgttgcccgtcagccccctccccaccctcaccttggactcgctttctcaggtttcccagttcatggcgtgtgaggagctgcccccgggggccccagagcttccccaagaaggccccacacgacgcctctccctaccgggccagctgggggccctcacctcccagcccctgcacagacacggctcggacccgggcagttagtggggctgcccagtgtggacacgtggctcacccagggatcaaggcgctgctgggccgctccccttggaggccctgctcaggaggccctgaccgtggaaggggagaggaactcgaaagcacagctcctcccccagcccttgggaccatcttctcctgcagtcccctgggccccagtgagaggggcaggggcagggccggcagtaggtggggcctgtggtccccccactgccctgagggcattagctggtctaactgcccggaggcacccggccctgggccttaggcacctcaaggacttttctgctatttactgctcttattgttaaggataataattaaggatcatatgaataattaatgaagatgctgatgactatgaataataaataattatcctgaggaga

SEQ ID NO: 892 - DNA, 3884 bp, Homo sapiens
  source 1..3884: mol_type = genomic DNA
  misc_feature 1..3884: note = cDNA of KCNH2 gene SNP c.442C>T (p.Arg148Trp)
atgccggtgcggaggggccacgtcgcgccgcagaacaccttcctggacaccatcatccgcaagtttgagggccagagccgtaagttcatcatcgccaacgctcgggtggagaactgcgccgtcatctactgcaacgacggcttctgcgagctgtgcggctactcgcgggccgaggtgatgcagcgaccctgcacctgcgacttcctgcacgggccgcgcacgcagcgccgcgctgccgcgcagatcgcgcaggcactgctgggcgccgaggagcgcaaagtggaaatcgccttctaccggaaagatgggagctgcttcctatgtctggtggatgtggtgcccgtgaagaacgaggatggggctgtcatcatgttcatcctcaatttcgaggtggtgatggagaaggacatggtggggtccccggctcatgacaccaaccactggggcccccccaccagctggctggccccaggccgcgccaagaccttccgcctgaagctgcccgcgctgctggcgctgacggcccgggagtcgtcggtgcggtcgggcggcgcgggcggcgcgggcgccccgggggccgtggtggtggacgtggacctgacgcccgcggcacccagcagcgagtcgctggccctggacgaagtgacagccatggacaaccacgtggcagggctcgggcccgcggaggagcggcgtgcgctggtgggtcccggctctccgccccgcagcgcgcccggccagctcccatcgccccgggcgcacagcctcaaccccgacgcctcgggctccagctgcagcctggcccggacgcgctcccgagaaagctgcgccagcgtgcgccgcgcctcgtcggccgacgacatcgaggccatgcgcgccggggtgctgcccccgccaccgcgccacgccagcaccggggccatgcacccactgcgcagcggcttgctcaactccacctcggactccgacctcgtgcgctaccgcaccattagcaagattccccaaatcaccctcaactttgtggacctcaagggcgaccccttcttggcttcgcccaccagtgaccgtgagatcatagcacctaagataaaggagcgaacccacaatgtcactgagaaggtcacccaggtcctgtccctgggcgccgacgtgctgcctgagtacaagctgcaggcaccgcgcatccaccgctggaccatcctgcattacagccccttcaaggccgtgtgggactggctcatcctgctgctggtcatctacacggctgtcttcacaccctactcggctgccttcctgctgaaggagacggaagaaggcccgcctgctaccgagtgtggctacgcctgccagccgctggctgtggtggacctcatcgtggacatcatgttcattgtggacatcctcatcaacttccgcaccacctacgtcaatgccaacgaggaggtggtcagccaccccggccgcatcgccgtccactacttcaagggctggttcctcatcgacatggtggccgccatccccttcgacctgctcatcttcggctctggctctgaggagctgatcgggctgctgaagactgcgcggctgctgcggctggtgcgcgtggcgcggaagctggatcgctactcagagtacggcgcggccgtgctgttcttgctcatgtgcacctttgcgctcatcgcgcactggctagcctgcatctggtacgccatcggcaacatggagcagccacacatggactcacgcatcggctggctgcacaacctgggcgaccagataggcaaaccctacaacagcagcggcctgggcggcccctccatcaaggacaagtatgtgacggcgctctacttcaccttcagcagcctcaccagtgtgggcttcggcaacgtctctcccaacaccaactcagagaagatcttctccatctgcgtcatgctcattggctccctcatgtatgctagcatcttcggcaacgtgtcggccatcatccagcggctgtactcgggcacagcccgctaccacacacagatgctgcgggtgcgggagttcatccgcttccaccagatccccaatcccctgcgccagcgcctcgaggagtacttccagcacgcctggtcctacaccaacggcatcgacatgaacgcggtgctgaagggcttccctgagtgcctgcaggctgacatctgcctgcacctgaaccgctcactgctgcagcactgcaaacccttccgaggggccaccaagggctgccttcgggccctggccatgaagttcaagaccacacatgcaccgccaggggacacactggtgcatgctggggacctgctcaccgccctgtacttcatctcccggggctccatcgagatcctgcggggcgacgtcgtcgtggccatcctggggaagaatgacatctttggggagcctctgaacctgtatgcaaggcctggcaagtcgaacggggatgtgcgggccctcacctactgtgacctacacaagatccatcgggacgacctgctggaggtgctggacatgtaccctgagttctccgaccacttctggtccagcctggagatcaccttcaacctgcgagataccaacatgatcccgggctcccccggcagtacggagttagagggtggcttcagtcggcaacgcaagcgcaagttgtccttccgcaggcgcacggacaaggacacggagcagccaggggaggtgtcggccttggggccgggccgggcgggggcagggccgagtagccggggccggccgggggggccgtggggggagagcccgtccagtggcccctccagccctgagagcagtgaggatgagggcccaggccgcagctccagccccctccgcctggtgcccttctccagccccaggccccccggagagccgccgggtggggagcccctgatggaggactgcgagaagagcagcgacacttgcaaccccctgtcaggcgccttctcaggagtgtccaacattttcagcttctggggggacagtcggggccgccagtaccaggagctccctcgatgccccgcccccacccccagcctcctcaacatccccctctccagcccgggtcggcggccccggggcgacgtggagagcaggctggatgccctccagcgccagctcaacaggctggagacccggctgagtgcagacatggccactgtcctgcagctgctacagaggcagatgacgctggtcccgcccgcctacagtgctgtgaccaccccggggcctggccccacttccacatccccgctgttgcccgtcagccccctccccaccctcaccttggactcgctttctcaggtttcccagttcatggcgtgtgaggagctgcccccgggggccccagagcttccccaagaaggccccacacgacgcctctccctaccgggccagctgggggccctcacctcccagcccctgcacagacacggctcggacccgggcagttagtggggctgcccagtgtggacacgtggctcacccagggatcaaggcgctgctgggccgctccccttggaggccctgctcaggaggccctgaccgtggaaggggagaggaactcgaaagcacagctcctcccccagcccttgggaccatcttctcctgcagtcccctgggccccagtgagaggggcaggggcagggccggcagtaggtggggcctgtggtccccccactgccctgagggcattagctggtctaactgcccggaggcacccggccctgggccttaggcacctcaaggacttttctgctatttactgctcttattgttaaggataataattaaggatcatatgaataattaatgaagatgctgatgactatgaataataaataattatcctgaggaga

SEQ ID NO: 893 - DNA, 3884 bp, Homo sapiens
  source 1..3884: mol_type = genomic DNA
  misc_feature 1..3884: note = cDNA of KCNH2 gene SNP c.443G>A (p.Arg148Gln)
atgccggtgcggaggggccacgtcgcgccgcagaacaccttcctggacaccatcatccgcaagtttgagggccagagccgtaagttcatcatcgccaacgctcgggtggagaactgcgccgtcatctactgcaacgacggcttctgcgagctgtgcggctactcgcgggccgaggtgatgcagcgaccctgcacctgcgacttcctgcacgggccgcgcacgcagcgccgcgctgccgcgcagatcgcgcaggcactgctgggcgccgaggagcgcaaagtggaaatcgccttctaccggaaagatgggagctgcttcctatgtctggtggatgtggtgcccgtgaagaacgaggatggggctgtcatcatgttcatcctcaatttcgaggtggtgatggagaaggacatggtggggtccccggctcatgacaccaaccaccagggcccccccaccagctggctggccccaggccgcgccaagaccttccgcctgaagctgcccgcgctgctggcgctgacggcccgggagtcgtcggtgcggtcgggcggcgcgggcggcgcgggcgccccgggggccgtggtggtggacgtggacctgacgcccgcggcacccagcagcgagtcgctggccctggacgaagtgacagccatggacaaccacgtggcagggctcgggcccgcggaggagcggcgtgcgctggtgggtcccggctctccgccccgcagcgcgcccggccagctcccatcgccccgggcgcacagcctcaaccccgacgcctcgggctccagctgcagcctggcccggacgcgctcccgagaaagctgcgccagcgtgcgccgcgcctcgtcggccgacgacatcgaggccatgcgcgccggggtgctgcccccgccaccgcgccacgccagcaccggggccatgcacccactgcgcagcggcttgctcaactccacctcggactccgacctcgtgcgctaccgcaccattagcaagattccccaaatcaccctcaactttgtggacctcaagggcgaccccttcttggcttcgcccaccagtgaccgtgagatcatagcacctaagataaaggagcgaacccacaatgtcactgagaaggtcacccaggtcctgtccctgggcgccgacgtgctgcctgagtacaagctgcaggcaccgcgcatccaccgctggaccatcctgcattacagccccttcaaggccgtgtgggactggctcatcctgctgctggtcatctacacggctgtcttcacaccctactcggctgccttcctgctgaaggagacggaagaaggcccgcctgctaccgagtgtggctacgcctgccagccgctggctgtggtggacctcatcgtggacatcatgttcattgtggacatcctcatcaacttccgcaccacctacgtcaatgccaacgaggaggtggtcagccaccccggccgcatcgccgtccactacttcaagggctggttcctcatcgacatggtggccgccatccccttcgacctgctcatcttcggctctggctctgaggagctgatcgggctgctgaagactgcgcggctgctgcggctggtgcgcgtggcgcggaagctggatcgctactcagagtacggcgcggccgtgctgttcttgctcatgtgcacctttgcgctcatcgcgcactggctagcctgcatctggtacgccatcggcaacatggagcagccacacatggactcacgcatcggctggctgcacaacctgggcgaccagataggcaaaccctacaacagcagcggcctgggcggcccctccatcaaggacaagtatgtgacggcgctctacttcaccttcagcagcctcaccagtgtgggcttcggcaacgtctctcccaacaccaactcagagaagatcttctccatctgcgtcatgctcattggctccctcatgtatgctagcatcttcggcaacgtgtcggccatcatccagcggctgtactcgggcacagcccgctaccacacacagatgctgcgggtgcgggagttcatccgcttccaccagatccccaatcccctgcgccagcgcctcgaggagtacttccagcacgcctggtcctacaccaacggcatcgacatgaacgcggtgctgaagggcttccctgagtgcctgcaggctgacatctgcctgcacctgaaccgctcactgctgcagcactgcaaacccttccgaggggccaccaagggctgccttcgggccctggccatgaagttcaagaccacacatgcaccgccaggggacacactggtgcatgctggggacctgctcaccgccctgtacttcatctcccggggctccatcgagatcctgcggggcgacgtcgtcgtggccatcctggggaagaatgacatctttggggagcctctgaacctgtatgcaaggcctggcaagtcgaacggggatgtgcgggccctcacctactgtgacctacacaagatccatcgggacgacctgctggaggtgctggacatgtaccctgagttctccgaccacttctggtccagcctggagatcaccttcaacctgcgagataccaacatgatcccgggctcccccggcagtacggagttagagggtggcttcagtcggcaacgcaagcgcaagttgtccttccgcaggcgcacggacaaggacacggagcagccaggggaggtgtcggccttggggccgggccgggcgggggcagggccgagtagccggggccggccgggggggccgtggggggagagcccgtccagtggcccctccagccctgagagcagtgaggatgagggcccaggccgcagctccagccccctccgcctggtgcccttctccagccccaggccccccggagagccgccgggtggggagcccctgatggaggactgcgagaagagcagcgacacttgcaaccccctgtcaggcgccttctcaggagtgtccaacattttcagcttctggggggacagtcggggccgccagtaccaggagctccctcgatgccccgcccccacccccagcctcctcaacatccccctctccagcccgggtcggcggccccggggcgacgtggagagcaggctggatgccctccagcgccagctcaacaggctggagacccggctgagtgcagacatggccactgtcctgcagctgctacagaggcagatgacgctggtcccgcccgcctacagtgctgtgaccaccccggggcctggccccacttccacatccccgctgttgcccgtcagccccctccccaccctcaccttggactcgctttctcaggtttcccagttcatggcgtgtgaggagctgcccccgggggccccagagcttccccaagaaggccccacacgacgcctctccctaccgggccagctgggggccctcacctcccagcccctgcacagacacggctcggacccgggcagttagtggggctgcccagtgtggacacgtggctcacccagggatcaaggcgctgctgggccgctccccttggaggccctgctcaggaggccctgaccgtggaaggggagaggaactcgaaagcacagctcctcccccagcccttgggaccatcttctcctgcagtcccctgggccccagtgagaggggcaggggcagggccggcagtaggtggggcctgtggtccccccactgccctgagggcattagctggtctaactgcccggaggcacccggccctgggccttaggcacctcaaggacttttctgctatttactgctcttattgttaaggataataattaaggatcatatgaataattaatgaagatgctgatgactatgaataataaataattatcctgaggaga

SEQ ID NO: 894 - DNA, 3884 bp, Homo sapiens
  source 1..3884: mol_type = genomic DNA
  misc_feature 1..3884: note = cDNA of KCNH2 gene SNP c.446G>A (p.Gly149Asp)
atgccggtgcggaggggccacgtcgcgccgcagaacaccttcctggacaccatcatccgcaagtttgagggccagagccgtaagttcatcatcgccaacgctcgggtggagaactgcgccgtcatctactgcaacgacggcttctgcgagctgtgcggctactcgcgggccgaggtgatgcagcgaccctgcacctgcgacttcctgcacgggccgcgcacgcagcgccgcgctgccgcgcagatcgcgcaggcactgctgggcgccgaggagcgcaaagtggaaatcgccttctaccggaaagatgggagctgcttcctatgtctggtggatgtggtgcccgtgaagaacgaggatggggctgtcatcatgttcatcctcaatttcgaggtggtgatggagaaggacatggtggggtccccggctcatgacaccaaccaccgggacccccccaccagctggctggccccaggccgcgccaagaccttccgcctgaagctgcccgcgctgctggcgctgacggcccgggagtcgtcggtgcggtcgggcggcgcgggcggcgcgggcgccccgggggccgtggtggtggacgtggacctgacgcccgcggcacccagcagcgagtcgctggccctggacgaagtgacagccatggacaaccacgtggcagggctcgggcccgcggaggagcggcgtgcgctggtgggtcccggctctccgccccgcagcgcgcccggccagctcccatcgccccgggcgcacagcctcaaccccgacgcctcgggctccagctgcagcctggcccggacgcgctcccgagaaagctgcgccagcgtgcgccgcgcctcgtcggccgacgacatcgaggccatgcgcgccggggtgctgcccccgccaccgcgccacgccagcaccggggccatgcacccactgcgcagcggcttgctcaactccacctcggactccgacctcgtgcgctaccgcaccattagcaagattccccaaatcaccctcaactttgtggacctcaagggcgaccccttcttggcttcgcccaccagtgaccgtgagatcatagcacctaagataaaggagcgaacccacaatgtcactgagaaggtcacccaggtcctgtccctgggcgccgacgtgctgcctgagtacaagctgcaggcaccgcgcatccaccgctggaccatcctgcattacagccccttcaaggccgtgtgggactggctcatcctgctgctggtcatctacacggctgtcttcacaccctactcggctgccttcctgctgaaggagacggaagaaggcccgcctgctaccgagtgtggctacgcctgccagccgctggctgtggtggacctcatcgtggacatcatgttcattgtggacatcctcatcaacttccgcaccacctacgtcaatgccaacgaggaggtggtcagccaccccggccgcatcgccgtccactacttcaagggctggttcctcatcgacatggtggccgccatccccttcgacctgctcatcttcggctctggctctgaggagctgatcgggctgctgaagactgcgcggctgctgcggctggtgcgcgtggcgcggaagctggatcgctactcagagtacggcgcggccgtgctgttcttgctcatgtgcacctttgcgctcatcgcgcactggctagcctgcatctggtacgccatcggcaacatggagcagccacacatggactcacgcatcggctggctgcacaacctgggcgaccagataggcaaaccctacaacagcagcggcctgggcggcccctccatcaaggacaagtatgtgacggcgctctacttcaccttcagcagcctcaccagtgtgggcttcggcaacgtctctcccaacaccaactcagagaagatcttctccatctgcgtcatgctcattggctccctcatgtatgctagcatcttcggcaacgtgtcggccatcatccagcggctgtactcgggcacagcccgctaccacacacagatgctgcgggtgcgggagttcatccgcttccaccagatccccaatcccctgcgccagcgcctcgaggagtacttccagcacgcctggtcctacaccaacggcatcgacatgaacgcggtgctgaagggcttccctgagtgcctgcaggctgacatctgcctgcacctgaaccgctcactgctgcagcactgcaaacccttccgaggggccaccaagggctgccttcgggccctggccatgaagttcaagaccacacatgcaccgccaggggacacactggtgcatgctggggacctgctcaccgccctgtacttcatctcccggggctccatcgagatcctgcggggcgacgtcgtcgtggccatcctggggaagaatgacatctttggggagcctctgaacctgtatgcaaggcctggcaagtcgaacggggatgtgcgggccctcacctactgtgacctacacaagatccatcgggacgacctgctggaggtgctggacatgtaccctgagttctccgaccacttctggtccagcctggagatcaccttcaacctgcgagataccaacatgatcccgggctcccccggcagtacggagttagagggtggcttcagtcggcaacgcaagcgcaagttgtccttccgcaggcgcacggacaaggacacggagcagccaggggaggtgtcggccttggggccgggccgggcgggggcagggccgagtagccggggccggccgggggggccgtggggggagagcccgtccagtggcccctccagccctgagagcagtgaggatgagggcccaggccgcagctccagccccctccgcctggtgcccttctccagccccaggccccccggagagccgccgggtggggagcccctgatggaggactgcgagaagagcagcgacacttgcaaccccctgtcaggcgccttctcaggagtgtccaacattttcagcttctggggggacagtcggggccgccagtaccaggagctccctcgatgccccgcccccacccccagcctcctcaacatccccctctccagcccgggtcggcggccccggggcgacgtggagagcaggctggatgccctccagcgccagctcaacaggctggagacccggctgagtgcagacatggccactgtcctgcagctgctacagaggcagatgacgctggtcccgcccgcctacagtgctgtgaccaccccggggcctggccccacttccacatccccgctgttgcccgtcagccccctccccaccctcaccttggactcgctttctcaggtttcccagttcatggcgtgtgaggagctgcccccgggggccccagagcttccccaagaaggccccacacgacgcctctccctaccgggccagctgggggccctcacctcccagcccctgcacagacacggctcggacccgggcagttagtggggctgcccagtgtggacacgtggctcacccagggatcaaggcgctgctgggccgctccccttggaggccctgctcaggaggccctgaccgtggaaggggagaggaactcgaaagcacagctcctcccccagcccttgggaccatcttctcctgcagtcccctgggccccagtgagaggggcaggggcagggccggcagtaggtggggcctgtggtccccccactgccctgagggcattagctggtctaactgcccggaggcacccggccctgggccttaggcacctcaaggacttttctgctatttactgctcttattgttaaggataataattaaggatcatatgaataattaatgaagatgctgatgactatgaataataaataattatcctgaggaga

SEQ ID NO: 895 - DNA, 3884 bp, Homo sapiens
  source 1..3884: mol_type = genomic DNA
  misc_feature 1..3884: note = cDNA of KCNH2 gene SNP c.446G>C (p.Gly149Ala)
atgccggtgcggaggggccacgtcgcgccgcagaacaccttcctggacaccatcatccgcaagtttgagggccagagccgtaagttcatcatcgccaacgctcgggtggagaactgcgccgtcatctactgcaacgacggcttctgcgagctgtgcggctactcgcgggccgaggtgatgcagcgaccctgcacctgcgacttcctgcacgggccgcgcacgcagcgccgcgctgccgcgcagatcgcgcaggcactgctgggcgccgaggagcgcaaagtggaaatcgccttctaccggaaagatgggagctgcttcctatgtctggtggatgtggtgcccgtgaagaacgaggatggggctgtcatcatgttcatcctcaatttcgaggtggtgatggagaaggacatggtggggtccccggctcatgacaccaaccaccgggccccccccaccagctggctggccccaggccgcgccaagaccttccgcctgaagctgcccgcgctgctggcgctgacggcccgggagtcgtcggtgcggtcgggcggcgcgggcggcgcgggcgccccgggggccgtggtggtggacgtggacctgacgcccgcggcacccagcagcgagtcgctggccctggacgaagtgacagccatggacaaccacgtggcagggctcgggcccgcggaggagcggcgtgcgctggtgggtcccggctctccgccccgcagcgcgcccggccagctcccatcgccccgggcgcacagcctcaaccccgacgcctcgggctccagctgcagcctggcccggacgcgctcccgagaaagctgcgccagcgtgcgccgcgcctcgtcggccgacgacatcgaggccatgcgcgccggggtgctgcccccgccaccgcgccacgccagcaccggggccatgcacccactgcgcagcggcttgctcaactccacctcggactccgacctcgtgcgctaccgcaccattagcaagattccccaaatcaccctcaactttgtggacctcaagggcgaccccttcttggcttcgcccaccagtgaccgtgagatcatagcacctaagataaaggagcgaacccacaatgtcactgagaaggtcacccaggtcctgtccctgggcgccgacgtgctgcctgagtacaagctgcaggcaccgcgcatccaccgctggaccatcctgcattacagccccttcaaggccgtgtgggactggctcatcctgctgctggtcatctacacggctgtcttcacaccctactcggctgccttcctgctgaaggagacggaagaaggcccgcctgctaccgagtgtggctacgcctgccagccgctggctgtggtggacctcatcgtggacatcatgttcattgtggacatcctcatcaacttccgcaccacctacgtcaatgccaacgaggaggtggtcagccaccccggccgcatcgccgtccactacttcaagggctggttcctcatcgacatggtggccgccatccccttcgacctgctcatcttcggctctggctctgaggagctgatcgggctgctgaagactgcgcggctgctgcggctggtgcgcgtggcgcggaagctggatcgctactcagagtacggcgcggccgtgctgttcttgctcatgtgcacctttgcgctcatcgcgcactggctagcctgcatctggtacgccatcggcaacatggagcagccacacatggactcacgcatcggctggctgcacaacctgggcgaccagataggcaaaccctacaacagcagcggcctgggcggcccctccatcaaggacaagtatgtgacggcgctctacttcaccttcagcagcctcaccagtgtgggcttcggcaacgtctctcccaacaccaactcagagaagatcttctccatctgcgtcatgctcattggctccctcatgtatgctagcatcttcggcaacgtgtcggccatcatccagcggctgtactcgggcacagcccgctaccacacacagatgctgcgggtgcgggagttcatccgcttccaccagatccccaatcccctgcgccagcgcctcgaggagtacttccagcacgcctggtcctacaccaacggcatcgacatgaacgcggtgctgaagggcttccctgagtgcctgcaggctgacatctgcctgcacctgaaccgctcactgctgcagcactgcaaacccttccgaggggccaccaagggctgccttcgggccctggccatgaagttcaagaccacacatgcaccgccaggggacacactggtgcatgctggggacctgctcaccgccctgtacttcatctcccggggctccatcgagatcctgcggggcgacgtcgtcgtggccatcctggggaagaatgacatctttggggagcctctgaacctgtatgcaaggcctggcaagtcgaacggggatgtgcgggccctcacctactgtgacctacacaagatccatcgggacgacctgctggaggtgctggacatgtaccctgagttctccgaccacttctggtccagcctggagatcaccttcaacctgcgagataccaacatgatcccgggctcccccggcagtacggagttagagggtggcttcagtcggcaacgcaagcgcaagttgtccttccgcaggcgcacggacaaggacacggagcagccaggggaggtgtcggccttggggccgggccgggcgggggcagggccgagtagccggggccggccgggggggccgtggggggagagcccgtccagtggcccctccagccctgagagcagtgaggatgagggcccaggccgcagctccagccccctccgcctggtgcccttctccagccccaggccccccggagagccgccgggtggggagcccctgatggaggactgcgagaagagcagcgacacttgcaaccccctgtcaggcgccttctcaggagtgtccaacattttcagcttctggggggacagtcggggccgccagtaccaggagctccctcgatgccccgcccccacccccagcctcctcaacatccccctctccagcccgggtcggcggccccggggcgacgtggagagcaggctggatgccctccagcgccagctcaacaggctggagacccggctgagtgcagacatggccactgtcctgcagctgctacagaggcagatgacgctggtcccgcccgcctacagtgctgtgaccaccccggggcctggccccacttccacatccccgctgttgcccgtcagccccctccccaccctcaccttggactcgctttctcaggtttcccagttcatggcgtgtgaggagctgcccccgggggccccagagcttccccaagaaggccccacacgacgcctctccctaccgggccagctgggggccctcacctcccagcccctgcacagacacggctcggacccgggcagttagtggggctgcccagtgtggacacgtggctcacccagggatcaaggcgctgctgggccgctccccttggaggccctgctcaggaggccctgaccgtggaaggggagaggaactcgaaagcacagctcctcccccagcccttgggaccatcttctcctgcagtcccctgggccccagtgagaggggcaggggcagggccggcagtaggtggggcctgtggtccccccactgccctgagggcattagctggtctaactgcccggaggcacccggccctgggccttaggcacctcaaggacttttctgctatttactgctcttattgttaaggataataattaaggatcatatgaataattaatgaagatgctgatgactatgaataataaataattatcctgaggaga

SEQ ID NO: 896 - DNA, 3884 bp, Homo sapiens
  source 1..3884: mol_type = genomic DNA
  misc_feature 1..3884: note = cDNA of KCNH2 gene SNP c.448C>T (p.Pro150Ser)
atgccggtgcggaggggccacgtcgcgccgcagaacaccttcctggacaccatcatccgcaagtttgagggccagagccgtaagttcatcatcgccaacgctcgggtggagaactgcgccgtcatctactgcaacgacggcttctgcgagctgtgcggctactcgcgggccgaggtgatgcagcgaccctgcacctgcgacttcctgcacgggccgcgcacgcagcgccgcgctgccgcgcagatcgcgcaggcactgctgggcgccgaggagcgcaaagtggaaatcgccttctaccggaaagatgggagctgcttcctatgtctggtggatgtggtgcccgtgaagaacgaggatggggctgtcatcatgttcatcctcaatttcgaggtggtgatggagaaggacatggtggggtccccggctcatgacaccaaccaccggggctcccccaccagctggctggccccaggccgcgccaagaccttccgcctgaagctgcccgcgctgctggcgctgacggcccgggagtcgtcggtgcggtcgggcggcgcgggcggcgcgggcgccccgggggccgtggtggtggacgtggacctgacgcccgcggcacccagcagcgagtcgctggccctggacgaagtgacagccatggacaaccacgtggcagggctcgggcccgcggaggagcggcgtgcgctggtgggtcccggctctccgccccgcagcgcgcccggccagctcccatcgccccgggcgcacagcctcaaccccgacgcctcgggctccagctgcagcctggcccggacgcgctcccgagaaagctgcgccagcgtgcgccgcgcctcgtcggccgacgacatcgaggccatgcgcgccggggtgctgcccccgccaccgcgccacgccagcaccggggccatgcacccactgcgcagcggcttgctcaactccacctcggactccgacctcgtgcgctaccgcaccattagcaagattccccaaatcaccctcaactttgtggacctcaagggcgaccccttcttggcttcgcccaccagtgaccgtgagatcatagcacctaagataaaggagcgaacccacaatgtcactgagaaggtcacccaggtcctgtccctgggcgccgacgtgctgcctgagtacaagctgcaggcaccgcgcatccaccgctggaccatcctgcattacagccccttcaaggccgtgtgggactggctcatcctgctgctggtcatctacacggctgtcttcacaccctactcggctgccttcctgctgaaggagacggaagaaggcccgcctgctaccgagtgtggctacgcctgccagccgctggctgtggtggacctcatcgtggacatcatgttcattgtggacatcctcatcaacttccgcaccacctacgtcaatgccaacgaggaggtggtcagccaccccggccgcatcgccgtccactacttcaagggctggttcctcatcgacatggtggccgccatccccttcgacctgctcatcttcggctctggctctgaggagctgatcgggctgctgaagactgcgcggctgctgcggctggtgcgcgtggcgcggaagctggatcgctactcagagtacggcgcggccgtgctgttcttgctcatgtgcacctttgcgctcatcgcgcactggctagcctgcatctggtacgccatcggcaacatggagcagccacacatggactcacgcatcggctggctgcacaacctgggcgaccagataggcaaaccctacaacagcagcggcctgggcggcccctccatcaaggacaagtatgtgacggcgctctacttcaccttcagcagcctcaccagtgtgggcttcggcaacgtctctcccaacaccaactcagagaagatcttctccatctgcgtcatgctcattggctccctcatgtatgctagcatcttcggcaacgtgtcggccatcatccagcggctgtactcgggcacagcccgctaccacacacagatgctgcgggtgcgggagttcatccgcttccaccagatccccaatcccctgcgccagcgcctcgaggagtacttccagcacgcctggtcctacaccaacggcatcgacatgaacgcggtgctgaagggcttccctgagtgcctgcaggctgacatctgcctgcacctgaaccgctcactgctgcagcactgcaaacccttccgaggggccaccaagggctgccttcgggccctggccatgaagttcaagaccacacatgcaccgccaggggacacactggtgcatgctggggacctgctcaccgccctgtacttcatctcccggggctccatcgagatcctgcggggcgacgtcgtcgtggccatcctggggaagaatgacatctttggggagcctctgaacctgtatgcaaggcctggcaagtcgaacggggatgtgcgggccctcacctactgtgacctacacaagatccatcgggacgacctgctggaggtgctggacatgtaccctgagttctccgaccacttctggtccagcctggagatcaccttcaacctgcgagataccaacatgatcccgggctcccccggcagtacggagttagagggtggcttcagtcggcaacgcaagcgcaagttgtccttccgcaggcgcacggacaaggacacggagcagccaggggaggtgtcggccttggggccgggccgggcgggggcagggccgagtagccggggccggccgggggggccgtggggggagagcccgtccagtggcccctccagccctgagagcagtgaggatgagggcccaggccgcagctccagccccctccgcctggtgcccttctccagccccaggccccccggagagccgccgggtggggagcccctgatggaggactgcgagaagagcagcgacacttgcaaccccctgtcaggcgccttctcaggagtgtccaacattttcagcttctggggggacagtcggggccgccagtaccaggagctccctcgatgccccgcccccacccccagcctcctcaacatccccctctccagcccgggtcggcggccccggggcgacgtggagagcaggctggatgccctccagcgccagctcaacaggctggagacccggctgagtgcagacatggccactgtcctgcagctgctacagaggcagatgacgctggtcccgcccgcctacagtgctgtgaccaccccggggcctggccccacttccacatccccgctgttgcccgtcagccccctccccaccctcaccttggactcgctttctcaggtttcccagttcatggcgtgtgaggagctgcccccgggggccccagagcttccccaagaaggccccacacgacgcctctccctaccgggccagctgggggccctcacctcccagcccctgcacagacacggctcggacccgggcagttagtggggctgcccagtgtggacacgtggctcacccagggatcaaggcgctgctgggccgctccccttggaggccctgctcaggaggccctgaccgtggaaggggagaggaactcgaaagcacagctcctcccccagcccttgggaccatcttctcctgcagtcccctgggccccagtgagaggggcaggggcagggccggcagtaggtggggcctgtggtccccccactgccctgagggcattagctggtctaactgcccggaggcacccggccctgggccttaggcacctcaaggacttttctgctatttactgctcttattgttaaggataataattaaggatcatatgaataattaatgaagatgctgatgactatgaataataaataattatcctgaggaga

SEQ ID NO: 897 - DNA, 3884 bp, Homo sapiens
  source 1..3884: mol_type = genomic DNA
  misc_feature 1..3884: note = cDNA of KCNH2 gene SNP c.449C>T (p.Pro150Leu)
atgccggtgcggaggggccacgtcgcgccgcagaacaccttcctggacaccatcatccgcaagtttgagggccagagccgtaagttcatcatcgccaacgctcgggtggagaactgcgccgtcatctactgcaacgacggcttctgcgagctgtgcggctactcgcgggccgaggtgatgcagcgaccctgcacctgcgacttcctgcacgggccgcgcacgcagcgccgcgctgccgcgcagatcgcgcaggcactgctgggcgccgaggagcgcaaagtggaaatcgccttctaccggaaagatgggagctgcttcctatgtctggtggatgtggtgcccgtgaagaacgaggatggggctgtcatcatgttcatcctcaatttcgaggtggtgatggagaaggacatggtggggtccccggctcatgacaccaaccaccggggcctccccaccagctggctggccccaggccgcgccaagaccttccgcctgaagctgcccgcgctgctggcgctgacggcccgggagtcgtcggtgcggtcgggcggcgcgggcggcgcgggcgccccgggggccgtggtggtggacgtggacctgacgcccgcggcacccagcagcgagtcgctggccctggacgaagtgacagccatggacaaccacgtggcagggctcgggcccgcggaggagcggcgtgcgctggtgggtcccggctctccgccccgcagcgcgcccggccagctcccatcgccccgggcgcacagcctcaaccccgacgcctcgggctccagctgcagcctggcccggacgcgctcccgagaaagctgcgccagcgtgcgccgcgcctcgtcggccgacgacatcgaggccatgcgcgccggggtgctgcccccgccaccgcgccacgccagcaccggggccatgcacccactgcgcagcggcttgctcaactccacctcggactccgacctcgtgcgctaccgcaccattagcaagattccccaaatcaccctcaactttgtggacctcaagggcgaccccttcttggcttcgcccaccagtgaccgtgagatcatagcacctaagataaaggagcgaacccacaatgtcactgagaaggtcacccaggtcctgtccctgggcgccgacgtgctgcctgagtacaagctgcaggcaccgcgcatccaccgctggaccatcctgcattacagccccttcaaggccgtgtgggactggctcatcctgctgctggtcatctacacggctgtcttcacaccctactcggctgccttcctgctgaaggagacggaagaaggcccgcctgctaccgagtgtggctacgcctgccagccgctggctgtggtggacctcatcgtggacatcatgttcattgtggacatcctcatcaacttccgcaccacctacgtcaatgccaacgaggaggtggtcagccaccccggccgcatcgccgtccactacttcaagggctggttcctcatcgacatggtggccgccatccccttcgacctgctcatcttcggctctggctctgaggagctgatcgggctgctgaagactgcgcggctgctgcggctggtgcgcgtggcgcggaagctggatcgctactcagagtacggcgcggccgtgctgttcttgctcatgtgcacctttgcgctcatcgcgcactggctagcctgcatctggtacgccatcggcaacatggagcagccacacatggactcacgcatcggctggctgcacaacctgggcgaccagataggcaaaccctacaacagcagcggcctgggcggcccctccatcaaggacaagtatgtgacggcgctctacttcaccttcagcagcctcaccagtgtgggcttcggcaacgtctctcccaacaccaactcagagaagatcttctccatctgcgtcatgctcattggctccctcatgtatgctagcatcttcggcaacgtgtcggccatcatccagcggctgtactcgggcacagcccgctaccacacacagatgctgcgggtgcgggagttcatccgcttccaccagatccccaatcccctgcgccagcgcctcgaggagtacttccagcacgcctggtcctacaccaacggcatcgacatgaacgcggtgctgaagggcttccctgagtgcctgcaggctgacatctgcctgcacctgaaccgctcactgctgcagcactgcaaacccttccgaggggccaccaagggctgccttcgggccctggccatgaagttcaagaccacacatgcaccgccaggggacacactggtgcatgctggggacctgctcaccgccctgtacttcatctcccggggctccatcgagatcctgcggggcgacgtcgtcgtggccatcctggggaagaatgacatctttggggagcctctgaacctgtatgcaaggcctggcaagtcgaacggggatgtgcgggccctcacctactgtgacctacacaagatccatcgggacgacctgctggaggtgctggacatgtaccctgagttctccgaccacttctggtccagcctggagatcaccttcaacctgcgagataccaacatgatcccgggctcccccggcagtacggagttagagggtggcttcagtcggcaacgcaagcgcaagttgtccttccgcaggcgcacggacaaggacacggagcagccaggggaggtgtcggccttggggccgggccgggcgggggcagggccgagtagccggggccggccgggggggccgtggggggagagcccgtccagtggcccctccagccctgagagcagtgaggatgagggcccaggccgcagctccagccccctccgcctggtgcccttctccagccccaggccccccggagagccgccgggtggggagcccctgatggaggactgcgagaagagcagcgacacttgcaaccccctgtcaggcgccttctcaggagtgtccaacattttcagcttctggggggacagtcggggccgccagtaccaggagctccctcgatgccccgcccccacccccagcctcctcaacatccccctctccagcccgggtcggcggccccggggcgacgtggagagcaggctggatgccctccagcgccagctcaacaggctggagacccggctgagtgcagacatggccactgtcctgcagctgctacagaggcagatgacgctggtcccgcccgcctacagtgctgtgaccaccccggggcctggccccacttccacatccccgctgttgcccgtcagccccctccccaccctcaccttggactcgctttctcaggtttcccagttcatggcgtgtgaggagctgcccccgggggccccagagcttccccaagaaggccccacacgacgcctctccctaccgggccagctgggggccctcacctcccagcccctgcacagacacggctcggacccgggcagttagtggggctgcccagtgtggacacgtggctcacccagggatcaaggcgctgctgggccgctccccttggaggccctgctcaggaggccctgaccgtggaaggggagaggaactcgaaagcacagctcctcccccagcccttgggaccatcttctcctgcagtcccctgggccccagtgagaggggcaggggcagggccggcagtaggtggggcctgtggtccccccactgccctgagggcattagctggtctaactgcccggaggcacccggccctgggccttaggcacctcaaggacttttctgctatttactgctcttattgttaaggataataattaaggatcatatgaataattaatgaagatgctgatgactatgaataataaataattatcctgaggaga

SEQ ID NO: 898 - DNA, 3884 bp, Homo sapiens
  source 1..3884: mol_type = genomic DNA
  misc_feature 1..3884: note = cDNA of KCNH2 gene SNP c.44T>A (p.Leu15Gln)
atgccggtgcggaggggccacgtcgcgccgcagaacaccttccaggacaccatcatccgcaagtttgagggccagagccgtaagttcatcatcgccaacgctcgggtggagaactgcgccgtcatctactgcaacgacggcttctgcgagctgtgcggctactcgcgggccgaggtgatgcagcgaccctgcacctgcgacttcctgcacgggccgcgcacgcagcgccgcgctgccgcgcagatcgcgcaggcactgctgggcgccgaggagcgcaaagtggaaatcgccttctaccggaaagatgggagctgcttcctatgtctggtggatgtggtgcccgtgaagaacgaggatggggctgtcatcatgttcatcctcaatttcgaggtggtgatggagaaggacatggtggggtccccggctcatgacaccaaccaccggggcccccccaccagctggctggccccaggccgcgccaagaccttccgcctgaagctgcccgcgctgctggcgctgacggcccgggagtcgtcggtgcggtcgggcggcgcgggcggcgcgggcgccccgggggccgtggtggtggacgtggacctgacgcccgcggcacccagcagcgagtcgctggccctggacgaagtgacagccatggacaaccacgtggcagggctcgggcccgcggaggagcggcgtgcgctggtgggtcccggctctccgccccgcagcgcgcccggccagctcccatcgccccgggcgcacagcctcaaccccgacgcctcgggctccagctgcagcctggcccggacgcgctcccgagaaagctgcgccagcgtgcgccgcgcctcgtcggccgacgacatcgaggccatgcgcgccggggtgctgcccccgccaccgcgccacgccagcaccggggccatgcacccactgcgcagcggcttgctcaactccacctcggactccgacctcgtgcgctaccgcaccattagcaagattccccaaatcaccctcaactttgtggacctcaagggcgaccccttcttggcttcgcccaccagtgaccgtgagatcatagcacctaagataaaggagcgaacccacaatgtcactgagaaggtcacccaggtcctgtccctgggcgccgacgtgctgcctgagtacaagctgcaggcaccgcgcatccaccgctggaccatcctgcattacagccccttcaaggccgtgtgggactggctcatcctgctgctggtcatctacacggctgtcttcacaccctactcggctgccttcctgctgaaggagacggaagaaggcccgcctgctaccgagtgtggctacgcctgccagccgctggctgtggtggacctcatcgtggacatcatgttcattgtggacatcctcatcaacttccgcaccacctacgtcaatgccaacgaggaggtggtcagccaccccggccgcatcgccgtccactacttcaagggctggttcctcatcgacatggtggccgccatccccttcgacctgctcatcttcggctctggctctgaggagctgatcgggctgctgaagactgcgcggctgctgcggctggtgcgcgtggcgcggaagctggatcgctactcagagtacggcgcggccgtgctgttcttgctcatgtgcacctttgcgctcatcgcgcactggctagcctgcatctggtacgccatcggcaacatggagcagccacacatggactcacgcatcggctggctgcacaacctgggcgaccagataggcaaaccctacaacagcagcggcctgggcggcccctccatcaaggacaagtatgtgacggcgctctacttcaccttcagcagcctcaccagtgtgggcttcggcaacgtctctcccaacaccaactcagagaagatcttctccatctgcgtcatgctcattggctccctcatgtatgctagcatcttcggcaacgtgtcggccatcatccagcggctgtactcgggcacagcccgctaccacacacagatgctgcgggtgcgggagttcatccgcttccaccagatccccaatcccctgcgccagcgcctcgaggagtacttccagcacgcctggtcctacaccaacggcatcgacatgaacgcggtgctgaagggcttccctgagtgcctgcaggctgacatctgcctgcacctgaaccgctcactgctgcagcactgcaaacccttccgaggggccaccaagggctgccttcgggccctggccatgaagttcaagaccacacatgcaccgccaggggacacactggtgcatgctggggacctgctcaccgccctgtacttcatctcccggggctccatcgagatcctgcggggcgacgtcgtcgtggccatcctggggaagaatgacatctttggggagcctctgaacctgtatgcaaggcctggcaagtcgaacggggatgtgcgggccctcacctactgtgacctacacaagatccatcgggacgacctgctggaggtgctggacatgtaccctgagttctccgaccacttctggtccagcctggagatcaccttcaacctgcgagataccaacatgatcccgggctcccccggcagtacggagttagagggtggcttcagtcggcaacgcaagcgcaagttgtccttccgcaggcgcacggacaaggacacggagcagccaggggaggtgtcggccttggggccgggccgggcgggggcagggccgagtagccggggccggccgggggggccgtggggggagagcccgtccagtggcccctccagccctgagagcagtgaggatgagggcccaggccgcagctccagccccctccgcctggtgcccttctccagccccaggccccccggagagccgccgggtggggagcccctgatggaggactgcgagaagagcagcgacacttgcaaccccctgtcaggcgccttctcaggagtgtccaacattttcagcttctggggggacagtcggggccgccagtaccaggagctccctcgatgccccgcccccacccccagcctcctcaacatccccctctccagcccgggtcggcggccccggggcgacgtggagagcaggctggatgccctccagcgccagctcaacaggctggagacccggctgagtgcagacatggccactgtcctgcagctgctacagaggcagatgacgctggtcccgcccgcctacagtgctgtgaccaccccggggcctggccccacttccacatccccgctgttgcccgtcagccccctccccaccctcaccttggactcgctttctcaggtttcccagttcatggcgtgtgaggagctgcccccgggggccccagagcttccccaagaaggccccacacgacgcctctccctaccgggccagctgggggccctcacctcccagcccctgcacagacacggctcggacccgggcagttagtggggctgcccagtgtggacacgtggctcacccagggatcaaggcgctgctgggccgctccccttggaggccctgctcaggaggccctgaccgtggaaggggagaggaactcgaaagcacagctcctcccccagcccttgggaccatcttctcctgcagtcccctgggccccagtgagaggggcaggggcagggccggcagtaggtggggcctgtggtccccccactgccctgagggcattagctggtctaactgcccggaggcacccggccctgggccttaggcacctcaaggacttttctgctatttactgctcttattgttaaggataataattaaggatcatatgaataattaatgaagatgctgatgactatgaataataaataattatcctgaggaga

SEQ ID NO: 899 - DNA, 3884 bp, Homo sapiens
  source 1..3884: mol_type = genomic DNA
  misc_feature 1..3884: note = cDNA of KCNH2 gene SNP c.44T>G (p.Leu15Arg)
atgccggtgcggaggggccacgtcgcgccgcagaacaccttccgggacaccatcatccgcaagtttgagggccagagccgtaagttcatcatcgccaacgctcgggtggagaactgcgccgtcatctactgcaacgacggcttctgcgagctgtgcggctactcgcgggccgaggtgatgcagcgaccctgcacctgcgacttcctgcacgggccgcgcacgcagcgccgcgctgccgcgcagatcgcgcaggcactgctgggcgccgaggagcgcaaagtggaaatcgccttctaccggaaagatgggagctgcttcctatgtctggtggatgtggtgcccgtgaagaacgaggatggggctgtcatcatgttcatcctcaatttcgaggtggtgatggagaaggacatggtggggtccccggctcatgacaccaaccaccggggcccccccaccagctggctggccccaggccgcgccaagaccttccgcctgaagctgcccgcgctgctggcgctgacggcccgggagtcgtcggtgcggtcgggcggcgcgggcggcgcgggcgccccgggggccgtggtggtggacgtggacctgacgcccgcggcacccagcagcgagtcgctggccctggacgaagtgacagccatggacaaccacgtggcagggctcgggcccgcggaggagcggcgtgcgctggtgggtcccggctctccgccccgcagcgcgcccggccagctcccatcgccccgggcgcacagcctcaaccccgacgcctcgggctccagctgcagcctggcccggacgcgctcccgagaaagctgcgccagcgtgcgccgcgcctcgtcggccgacgacatcgaggccatgcgcgccggggtgctgcccccgccaccgcgccacgccagcaccggggccatgcacccactgcgcagcggcttgctcaactccacctcggactccgacctcgtgcgctaccgcaccattagcaagattccccaaatcaccctcaactttgtggacctcaagggcgaccccttcttggcttcgcccaccagtgaccgtgagatcatagcacctaagataaaggagcgaacccacaatgtcactgagaaggtcacccaggtcctgtccctgggcgccgacgtgctgcctgagtacaagctgcaggcaccgcgcatccaccgctggaccatcctgcattacagccccttcaaggccgtgtgggactggctcatcctgctgctggtcatctacacggctgtcttcacaccctactcggctgccttcctgctgaaggagacggaagaaggcccgcctgctaccgagtgtggctacgcctgccagccgctggctgtggtggacctcatcgtggacatcatgttcattgtggacatcctcatcaacttccgcaccacctacgtcaatgccaacgaggaggtggtcagccaccccggccgcatcgccgtccactacttcaagggctggttcctcatcgacatggtggccgccatccccttcgacctgctcatcttcggctctggctctgaggagctgatcgggctgctgaagactgcgcggctgctgcggctggtgcgcgtggcgcggaagctggatcgctactcagagtacggcgcggccgtgctgttcttgctcatgtgcacctttgcgctcatcgcgcactggctagcctgcatctggtacgccatcggcaacatggagcagccacacatggactcacgcatcggctggctgcacaacctgggcgaccagataggcaaaccctacaacagcagcggcctgggcggcccctccatcaaggacaagtatgtgacggcgctctacttcaccttcagcagcctcaccagtgtgggcttcggcaacgtctctcccaacaccaactcagagaagatcttctccatctgcgtcatgctcattggctccctcatgtatgctagcatcttcggcaacgtgtcggccatcatccagcggctgtactcgggcacagcccgctaccacacacagatgctgcgggtgcgggagttcatccgcttccaccagatccccaatcccctgcgccagcgcctcgaggagtacttccagcacgcctggtcctacaccaacggcatcgacatgaacgcggtgctgaagggcttccctgagtgcctgcaggctgacatctgcctgcacctgaaccgctcactgctgcagcactgcaaacccttccgaggggccaccaagggctgccttcgggccctggccatgaagttcaagaccacacatgcaccgccaggggacacactggtgcatgctggggacctgctcaccgccctgtacttcatctcccggggctccatcgagatcctgcggggcgacgtcgtcgtggccatcctggggaagaatgacatctttggggagcctctgaacctgtatgcaaggcctggcaagtcgaacggggatgtgcgggccctcacctactgtgacctacacaagatccatcgggacgacctgctggaggtgctggacatgtaccctgagttctccgaccacttctggtccagcctggagatcaccttcaacctgcgagataccaacatgatcccgggctcccccggcagtacggagttagagggtggcttcagtcggcaacgcaagcgcaagttgtccttccgcaggcgcacggacaaggacacggagcagccaggggaggtgtcggccttggggccgggccgggcgggggcagggccgagtagccggggccggccgggggggccgtggggggagagcccgtccagtggcccctccagccctgagagcagtgaggatgagggcccaggccgcagctccagccccctccgcctggtgcccttctccagccccaggccccccggagagccgccgggtggggagcccctgatggaggactgcgagaagagcagcgacacttgcaaccccctgtcaggcgccttctcaggagtgtccaacattttcagcttctggggggacagtcggggccgccagtaccaggagctccctcgatgccccgcccccacccccagcctcctcaacatccccctctccagcccgggtcggcggccccggggcgacgtggagagcaggctggatgccctccagcgccagctcaacaggctggagacccggctgagtgcagacatggccactgtcctgcagctgctacagaggcagatgacgctggtcccgcccgcctacagtgctgtgaccaccccggggcctggccccacttccacatccccgctgttgcccgtcagccccctccccaccctcaccttggactcgctttctcaggtttcccagttcatggcgtgtgaggagctgcccccgggggccccagagcttccccaagaaggccccacacgacgcctctccctaccgggccagctgggggccctcacctcccagcccctgcacagacacggctcggacccgggcagttagtggggctgcccagtgtggacacgtggctcacccagggatcaaggcgctgctgggccgctccccttggaggccctgctcaggaggccctgaccgtggaaggggagaggaactcgaaagcacagctcctcccccagcccttgggaccatcttctcctgcagtcccctgggccccagtgagaggggcaggggcagggccggcagtaggtggggcctgtggtccccccactgccctgagggcattagctggtctaactgcccggaggcacccggccctgggccttaggcacctcaaggacttttctgctatttactgctcttattgttaaggataataattaaggatcatatgaataattaatgaagatgctgatgactatgaataataaataattatcctgaggaga

SEQ ID NO: 900 - DNA, 3884 bp, Homo sapiens
  source 1..3884: mol_type = genomic DNA
  misc_feature 1..3884: note = cDNA of KCNH2 gene SNP c.451C>G (p.Pro151Ala)
atgccggtgcggaggggccacgtcgcgccgcagaacaccttcctggacaccatcatccgcaagtttgagggccagagccgtaagttcatcatcgccaacgctcgggtggagaactgcgccgtcatctactgcaacgacggcttctgcgagctgtgcggctactcgcgggccgaggtgatgcagcgaccctgcacctgcgacttcctgcacgggccgcgcacgcagcgccgcgctgccgcgcagatcgcgcaggcactgctgggcgccgaggagcgcaaagtggaaatcgccttctaccggaaagatgggagctgcttcctatgtctggtggatgtggtgcccgtgaagaacgaggatggggctgtcatcatgttcatcctcaatttcgaggtggtgatggagaaggacatggtggggtccccggctcatgacaccaaccaccggggccccgccaccagctggctggccccaggccgcgccaagaccttccgcctgaagctgcccgcgctgctggcgctgacggcccgggagtcgtcggtgcggtcgggcggcgcgggcggcgcgggcgccccgggggccgtggtggtggacgtggacctgacgcccgcggcacccagcagcgagtcgctggccctggacgaagtgacagccatggacaaccacgtggcagggctcgggcccgcggaggagcggcgtgcgctggtgggtcccggctctccgccccgcagcgcgcccggccagctcccatcgccccgggcgcacagcctcaaccccgacgcctcgggctccagctgcagcctggcccggacgcgctcccgagaaagctgcgccagcgtgcgccgcgcctcgtcggccgacgacatcgaggccatgcgcgccggggtgctgcccccgccaccgcgccacgccagcaccggggccatgcacccactgcgcagcggcttgctcaactccacctcggactccgacctcgtgcgctaccgcaccattagcaagattccccaaatcaccctcaactttgtggacctcaagggcgaccccttcttggcttcgcccaccagtgaccgtgagatcatagcacctaagataaaggagcgaacccacaatgtcactgagaaggtcacccaggtcctgtccctgggcgccgacgtgctgcctgagtacaagctgcaggcaccgcgcatccaccgctggaccatcctgcattacagccccttcaaggccgtgtgggactggctcatcctgctgctggtcatctacacggctgtcttcacaccctactcggctgccttcctgctgaaggagacggaagaaggcccgcctgctaccgagtgtggctacgcctgccagccgctggctgtggtggacctcatcgtggacatcatgttcattgtggacatcctcatcaacttccgcaccacctacgtcaatgccaacgaggaggtggtcagccaccccggccgcatcgccgtccactacttcaagggctggttcctcatcgacatggtggccgccatccccttcgacctgctcatcttcggctctggctctgaggagctgatcgggctgctgaagactgcgcggctgctgcggctggtgcgcgtggcgcggaagctggatcgctactcagagtacggcgcggccgtgctgttcttgctcatgtgcacctttgcgctcatcgcgcactggctagcctgcatctggtacgccatcggcaacatggagcagccacacatggactcacgcatcggctggctgcacaacctgggcgaccagataggcaaaccctacaacagcagcggcctgggcggcccctccatcaaggacaagtatgtgacggcgctctacttcaccttcagcagcctcaccagtgtgggcttcggcaacgtctctcccaacaccaactcagagaagatcttctccatctgcgtcatgctcattggctccctcatgtatgctagcatcttcggcaacgtgtcggccatcatccagcggctgtactcgggcacagcccgctaccacacacagatgctgcgggtgcgggagttcatccgcttccaccagatccccaatcccctgcgccagcgcctcgaggagtacttccagcacgcctggtcctacaccaacggcatcgacatgaacgcggtgctgaagggcttccctgagtgcctgcaggctgacatctgcctgcacctgaaccgctcactgctgcagcactgcaaacccttccgaggggccaccaagggctgccttcgggccctggccatgaagttcaagaccacacatgcaccgccaggggacacactggtgcatgctggggacctgctcaccgccctgtacttcatctcccggggctccatcgagatcctgcggggcgacgtcgtcgtggccatcctggggaagaatgacatctttggggagcctctgaacctgtatgcaaggcctggcaagtcgaacggggatgtgcgggccctcacctactgtgacctacacaagatccatcgggacgacctgctggaggtgctggacatgtaccctgagttctccgaccacttctggtccagcctggagatcaccttcaacctgcgagataccaacatgatcccgggctcccccggcagtacggagttagagggtggcttcagtcggcaacgcaagcgcaagttgtccttccgcaggcgcacggacaaggacacggagcagccaggggaggtgtcggccttggggccgggccgggcgggggcagggccgagtagccggggccggccgggggggccgtggggggagagcccgtccagtggcccctccagccctgagagcagtgaggatgagggcccaggccgcagctccagccccctccgcctggtgcccttctccagccccaggccccccggagagccgccgggtggggagcccctgatggaggactgcgagaagagcagcgacacttgcaaccccctgtcaggcgccttctcaggagtgtccaacattttcagcttctggggggacagtcggggccgccagtaccaggagctccctcgatgccccgcccccacccccagcctcctcaacatccccctctccagcccgggtcggcggccccggggcgacgtggagagcaggctggatgccctccagcgccagctcaacaggctggagacccggctgagtgcagacatggccactgtcctgcagctgctacagaggcagatgacgctggtcccgcccgcctacagtgctgtgaccaccccggggcctggccccacttccacatccccgctgttgcccgtcagccccctccccaccctcaccttggactcgctttctcaggtttcccagttcatggcgtgtgaggagctgcccccgggggccccagagcttccccaagaaggccccacacgacgcctctccctaccgggccagctgggggccctcacctcccagcccctgcacagacacggctcggacccgggcagttagtggggctgcccagtgtggacacgtggctcacccagggatcaaggcgctgctgggccgctccccttggaggccctgctcaggaggccctgaccgtggaaggggagaggaactcgaaagcacagctcctcccccagcccttgggaccatcttctcctgcagtcccctgggccccagtgagaggggcaggggcagggccggcagtaggtggggcctgtggtccccccactgccctgagggcattagctggtctaactgcccggaggcacccggccctgggccttaggcacctcaaggacttttctgctatttactgctcttattgttaaggataataattaaggatcatatgaataattaatgaagatgctgatgactatgaataataaataattatcctgaggaga

SEQ ID NO: 901 - DNA, 3884 bp, Homo sapiens
  source 1..3884: mol_type = genomic DNA
  misc_feature 1..3884: note = cDNA of KCNH2 gene SNP c.451C>T (p.Pro151Ser)
atgccggtgcggaggggccacgtcgcgccgcagaacaccttcctggacaccatcatccgcaagtttgagggccagagccgtaagttcatcatcgccaacgctcgggtggagaactgcgccgtcatctactgcaacgacggcttctgcgagctgtgcggctactcgcgggccgaggtgatgcagcgaccctgcacctgcgacttcctgcacgggccgcgcacgcagcgccgcgctgccgcgcagatcgcgcaggcactgctgggcgccgaggagcgcaaagtggaaatcgccttctaccggaaagatgggagctgcttcctatgtctggtggatgtggtgcccgtgaagaacgaggatggggctgtcatcatgttcatcctcaatttcgaggtggtgatggagaaggacatggtggggtccccggctcatgacaccaaccaccggggcccctccaccagctggctggccccaggccgcgccaagaccttccgcctgaagctgcccgcgctgctggcgctgacggcccgggagtcgtcggtgcggtcgggcggcgcgggcggcgcgggcgccccgggggccgtggtggtggacgtggacctgacgcccgcggcacccagcagcgagtcgctggccctggacgaagtgacagccatggacaaccacgtggcagggctcgggcccgcggaggagcggcgtgcgctggtgggtcccggctctccgccccgcagcgcgcccggccagctcccatcgccccgggcgcacagcctcaaccccgacgcctcgggctccagctgcagcctggcccggacgcgctcccgagaaagctgcgccagcgtgcgccgcgcctcgtcggccgacgacatcgaggccatgcgcgccggggtgctgcccccgccaccgcgccacgccagcaccggggccatgcacccactgcgcagcggcttgctcaactccacctcggactccgacctcgtgcgctaccgcaccattagcaagattccccaaatcaccctcaactttgtggacctcaagggcgaccccttcttggcttcgcccaccagtgaccgtgagatcatagcacctaagataaaggagcgaacccacaatgtcactgagaaggtcacccaggtcctgtccctgggcgccgacgtgctgcctgagtacaagctgcaggcaccgcgcatccaccgctggaccatcctgcattacagccccttcaaggccgtgtgggactggctcatcctgctgctggtcatctacacggctgtcttcacaccctactcggctgccttcctgctgaaggagacggaagaaggcccgcctgctaccgagtgtggctacgcctgccagccgctggctgtggtggacctcatcgtggacatcatgttcattgtggacatcctcatcaacttccgcaccacctacgtcaatgccaacgaggaggtggtcagccaccccggccgcatcgccgtccactacttcaagggctggttcctcatcgacatggtggccgccatccccttcgacctgctcatcttcggctctggctctgaggagctgatcgggctgctgaagactgcgcggctgctgcggctggtgcgcgtggcgcggaagctggatcgctactcagagtacggcgcggccgtgctgttcttgctcatgtgcacctttgcgctcatcgcgcactggctagcctgcatctggtacgccatcggcaacatggagcagccacacatggactcacgcatcggctggctgcacaacctgggcgaccagataggcaaaccctacaacagcagcggcctgggcggcccctccatcaaggacaagtatgtgacggcgctctacttcaccttcagcagcctcaccagtgtgggcttcggcaacgtctctcccaacaccaactcagagaagatcttctccatctgcgtcatgctcattggctccctcatgtatgctagcatcttcggcaacgtgtcggccatcatccagcggctgtactcgggcacagcccgctaccacacacagatgctgcgggtgcgggagttcatccgcttccaccagatccccaatcccctgcgccagcgcctcgaggagtacttccagcacgcctggtcctacaccaacggcatcgacatgaacgcggtgctgaagggcttccctgagtgcctgcaggctgacatctgcctgcacctgaaccgctcactgctgcagcactgcaaacccttccgaggggccaccaagggctgccttcgggccctggccatgaagttcaagaccacacatgcaccgccaggggacacactggtgcatgctggggacctgctcaccgccctgtacttcatctcccggggctccatcgagatcctgcggggcgacgtcgtcgtggccatcctggggaagaatgacatctttggggagcctctgaacctgtatgcaaggcctggcaagtcgaacggggatgtgcgggccctcacctactgtgacctacacaagatccatcgggacgacctgctggaggtgctggacatgtaccctgagttctccgaccacttctggtccagcctggagatcaccttcaacctgcgagataccaacatgatcccgggctcccccggcagtacggagttagagggtggcttcagtcggcaacgcaagcgcaagttgtccttccgcaggcgcacggacaaggacacggagcagccaggggaggtgtcggccttggggccgggccgggcgggggcagggccgagtagccggggccggccgggggggccgtggggggagagcccgtccagtggcccctccagccctgagagcagtgaggatgagggcccaggccgcagctccagccccctccgcctggtgcccttctccagccccaggccccccggagagccgccgggtggggagcccctgatggaggactgcgagaagagcagcgacacttgcaaccccctgtcaggcgccttctcaggagtgtccaacattttcagcttctggggggacagtcggggccgccagtaccaggagctccctcgatgccccgcccccacccccagcctcctcaacatccccctctccagcccgggtcggcggccccggggcgacgtggagagcaggctggatgccctccagcgccagctcaacaggctggagacccggctgagtgcagacatggccactgtcctgcagctgctacagaggcagatgacgctggtcccgcccgcctacagtgctgtgaccaccccggggcctggccccacttccacatccccgctgttgcccgtcagccccctccccaccctcaccttggactcgctttctcaggtttcccagttcatggcgtgtgaggagctgcccccgggggccccagagcttccccaagaaggccccacacgacgcctctccctaccgggccagctgggggccctcacctcccagcccctgcacagacacggctcggacccgggcagttagtggggctgcccagtgtggacacgtggctcacccagggatcaaggcgctgctgggccgctccccttggaggccctgctcaggaggccctgaccgtggaaggggagaggaactcgaaagcacagctcctcccccagcccttgggaccatcttctcctgcagtcccctgggccccagtgagaggggcaggggcagggccggcagtaggtggggcctgtggtccccccactgccctgagggcattagctggtctaactgcccggaggcacccggccctgggccttaggcacctcaaggacttttctgctatttactgctcttattgttaaggataataattaaggatcatatgaataattaatgaagatgctgatgactatgaataataaataattatcctgaggaga

SEQ ID NO: 902 - DNA, 3884 bp, Homo sapiens
  source 1..3884: mol_type = genomic DNA
  misc_feature 1..3884: note = cDNA of KCNH2 gene SNP c.455C>G (p.Thr152Ser)
atgccggtgcggaggggccacgtcgcgccgcagaacaccttcctggacaccatcatccgcaagtttgagggccagagccgtaagttcatcatcgccaacgctcgggtggagaactgcgccgtcatctactgcaacgacggcttctgcgagctgtgcggctactcgcgggccgaggtgatgcagcgaccctgcacctgcgacttcctgcacgggccgcgcacgcagcgccgcgctgccgcgcagatcgcgcaggcactgctgggcgccgaggagcgcaaagtggaaatcgccttctaccggaaagatgggagctgcttcctatgtctggtggatgtggtgcccgtgaagaacgaggatggggctgtcatcatgttcatcctcaatttcgaggtggtgatggagaaggacatggtggggtccccggctcatgacaccaaccaccggggcccccccagcagctggctggccccaggccgcgccaagaccttccgcctgaagctgcccgcgctgctggcgctgacggcccgggagtcgtcggtgcggtcgggcggcgcgggcggcgcgggcgccccgggggccgtggtggtggacgtggacctgacgcccgcggcacccagcagcgagtcgctggccctggacgaagtgacagccatggacaaccacgtggcagggctcgggcccgcggaggagcggcgtgcgctggtgggtcccggctctccgccccgcagcgcgcccggccagctcccatcgccccgggcgcacagcctcaaccccgacgcctcgggctccagctgcagcctggcccggacgcgctcccgagaaagctgcgccagcgtgcgccgcgcctcgtcggccgacgacatcgaggccatgcgcgccggggtgctgcccccgccaccgcgccacgccagcaccggggccatgcacccactgcgcagcggcttgctcaactccacctcggactccgacctcgtgcgctaccgcaccattagcaagattccccaaatcaccctcaactttgtggacctcaagggcgaccccttcttggcttcgcccaccagtgaccgtgagatcatagcacctaagataaaggagcgaacccacaatgtcactgagaaggtcacccaggtcctgtccctgggcgccgacgtgctgcctgagtacaagctgcaggcaccgcgcatccaccgctggaccatcctgcattacagccccttcaaggccgtgtgggactggctcatcctgctgctggtcatctacacggctgtcttcacaccctactcggctgccttcctgctgaaggagacggaagaaggcccgcctgctaccgagtgtggctacgcctgccagccgctggctgtggtggacctcatcgtggacatcatgttcattgtggacatcctcatcaacttccgcaccacctacgtcaatgccaacgaggaggtggtcagccaccccggccgcatcgccgtccactacttcaagggctggttcctcatcgacatggtggccgccatccccttcgacctgctcatcttcggctctggctctgaggagctgatcgggctgctgaagactgcgcggctgctgcggctggtgcgcgtggcgcggaagctggatcgctactcagagtacggcgcggccgtgctgttcttgctcatgtgcacctttgcgctcatcgcgcactggctagcctgcatctggtacgccatcggcaacatggagcagccacacatggactcacgcatcggctggctgcacaacctgggcgaccagataggcaaaccctacaacagcagcggcctgggcggcccctccatcaaggacaagtatgtgacggcgctctacttcaccttcagcagcctcaccagtgtgggcttcggcaacgtctctcccaacaccaactcagagaagatcttctccatctgcgtcatgctcattggctccctcatgtatgctagcatcttcggcaacgtgtcggccatcatccagcggctgtactcgggcacagcccgctaccacacacagatgctgcgggtgcgggagttcatccgcttccaccagatccccaatcccctgcgccagcgcctcgaggagtacttccagcacgcctggtcctacaccaacggcatcgacatgaacgcggtgctgaagggcttccctgagtgcctgcaggctgacatctgcctgcacctgaaccgctcactgctgcagcactgcaaacccttccgaggggccaccaagggctgccttcgggccctggccatgaagttcaagaccacacatgcaccgccaggggacacactggtgcatgctggggacctgctcaccgccctgtacttcatctcccggggctccatcgagatcctgcggggcgacgtcgtcgtggccatcctggggaagaatgacatctttggggagcctctgaacctgtatgcaaggcctggcaagtcgaacggggatgtgcgggccctcacctactgtgacctacacaagatccatcgggacgacctgctggaggtgctggacatgtaccctgagttctccgaccacttctggtccagcctggagatcaccttcaacctgcgagataccaacatgatcccgggctcccccggcagtacggagttagagggtggcttcagtcggcaacgcaagcgcaagttgtccttccgcaggcgcacggacaaggacacggagcagccaggggaggtgtcggccttggggccgggccgggcgggggcagggccgagtagccggggccggccgggggggccgtggggggagagcccgtccagtggcccctccagccctgagagcagtgaggatgagggcccaggccgcagctccagccccctccgcctggtgcccttctccagccccaggccccccggagagccgccgggtggggagcccctgatggaggactgcgagaagagcagcgacacttgcaaccccctgtcaggcgccttctcaggagtgtccaacattttcagcttctggggggacagtcggggccgccagtaccaggagctccctcgatgccccgcccccacccccagcctcctcaacatccccctctccagcccgggtcggcggccccggggcgacgtggagagcaggctggatgccctccagcgccagctcaacaggctggagacccggctgagtgcagacatggccactgtcctgcagctgctacagaggcagatgacgctggtcccgcccgcctacagtgctgtgaccaccccggggcctggccccacttccacatccccgctgttgcccgtcagccccctccccaccctcaccttggactcgctttctcaggtttcccagttcatggcgtgtgaggagctgcccccgggggccccagagcttccccaagaaggccccacacgacgcctctccctaccgggccagctgggggccctcacctcccagcccctgcacagacacggctcggacccgggcagttagtggggctgcccagtgtggacacgtggctcacccagggatcaaggcgctgctgggccgctccccttggaggccctgctcaggaggccctgaccgtggaaggggagaggaactcgaaagcacagctcctcccccagcccttgggaccatcttctcctgcagtcccctgggccccagtgagaggggcaggggcagggccggcagtaggtggggcctgtggtccccccactgccctgagggcattagctggtctaactgcccggaggcacccggccctgggccttaggcacctcaaggacttttctgctatttactgctcttattgttaaggataataattaaggatcatatgaataattaatgaagatgctgatgactatgaataataaataattatcctgaggaga

SEQ ID NO: 903 - DNA, 3884 bp, Homo sapiens
  source 1..3884: mol_type = genomic DNA
  misc_feature 1..3884: note = cDNA of KCNH2 gene SNP c.455C>T (p.Thr152Ile)
atgccggtgcggaggggccacgtcgcgccgcagaacaccttcctggacaccatcatccgcaagtttgagggccagagccgtaagttcatcatcgccaacgctcgggtggagaactgcgccgtcatctactgcaacgacggcttctgcgagctgtgcggctactcgcgggccgaggtgatgcagcgaccctgcacctgcgacttcctgcacgggccgcgcacgcagcgccgcgctgccgcgcagatcgcgcaggcactgctgggcgccgaggagcgcaaagtggaaatcgccttctaccggaaagatgggagctgcttcctatgtctggtggatgtggtgcccgtgaagaacgaggatggggctgtcatcatgttcatcctcaatttcgaggtggtgatggagaaggacatggtggggtccccggctcatgacaccaaccaccggggcccccccatcagctggctggccccaggccgcgccaagaccttccgcctgaagctgcccgcgctgctggcgctgacggcccgggagtcgtcggtgcggtcgggcggcgcgggcggcgcgggcgccccgggggccgtggtggtggacgtggacctgacgcccgcggcacccagcagcgagtcgctggccctggacgaagtgacagccatggacaaccacgtggcagggctcgggcccgcggaggagcggcgtgcgctggtgggtcccggctctccgccccgcagcgcgcccggccagctcccatcgccccgggcgcacagcctcaaccccgacgcctcgggctccagctgcagcctggcccggacgcgctcccgagaaagctgcgccagcgtgcgccgcgcctcgtcggccgacgacatcgaggccatgcgcgccggggtgctgcccccgccaccgcgccacgccagcaccggggccatgcacccactgcgcagcggcttgctcaactccacctcggactccgacctcgtgcgctaccgcaccattagcaagattccccaaatcaccctcaactttgtggacctcaagggcgaccccttcttggcttcgcccaccagtgaccgtgagatcatagcacctaagataaaggagcgaacccacaatgtcactgagaaggtcacccaggtcctgtccctgggcgccgacgtgctgcctgagtacaagctgcaggcaccgcgcatccaccgctggaccatcctgcattacagccccttcaaggccgtgtgggactggctcatcctgctgctggtcatctacacggctgtcttcacaccctactcggctgccttcctgctgaaggagacggaagaaggcccgcctgctaccgagtgtggctacgcctgccagccgctggctgtggtggacctcatcgtggacatcatgttcattgtggacatcctcatcaacttccgcaccacctacgtcaatgccaacgaggaggtggtcagccaccccggccgcatcgccgtccactacttcaagggctggttcctcatcgacatggtggccgccatccccttcgacctgctcatcttcggctctggctctgaggagctgatcgggctgctgaagactgcgcggctgctgcggctggtgcgcgtggcgcggaagctggatcgctactcagagtacggcgcggccgtgctgttcttgctcatgtgcacctttgcgctcatcgcgcactggctagcctgcatctggtacgccatcggcaacatggagcagccacacatggactcacgcatcggctggctgcacaacctgggcgaccagataggcaaaccctacaacagcagcggcctgggcggcccctccatcaaggacaagtatgtgacggcgctctacttcaccttcagcagcctcaccagtgtgggcttcggcaacgtctctcccaacaccaactcagagaagatcttctccatctgcgtcatgctcattggctccctcatgtatgctagcatcttcggcaacgtgtcggccatcatccagcggctgtactcgggcacagcccgctaccacacacagatgctgcgggtgcgggagttcatccgcttccaccagatccccaatcccctgcgccagcgcctcgaggagtacttccagcacgcctggtcctacaccaacggcatcgacatgaacgcggtgctgaagggcttccctgagtgcctgcaggctgacatctgcctgcacctgaaccgctcactgctgcagcactgcaaacccttccgaggggccaccaagggctgccttcgggccctggccatgaagttcaagaccacacatgcaccgccaggggacacactggtgcatgctggggacctgctcaccgccctgtacttcatctcccggggctccatcgagatcctgcggggcgacgtcgtcgtggccatcctggggaagaatgacatctttggggagcctctgaacctgtatgcaaggcctggcaagtcgaacggggatgtgcgggccctcacctactgtgacctacacaagatccatcgggacgacctgctggaggtgctggacatgtaccctgagttctccgaccacttctggtccagcctggagatcaccttcaacctgcgagataccaacatgatcccgggctcccccggcagtacggagttagagggtggcttcagtcggcaacgcaagcgcaagttgtccttccgcaggcgcacggacaaggacacggagcagccaggggaggtgtcggccttggggccgggccgggcgggggcagggccgagtagccggggccggccgggggggccgtggggggagagcccgtccagtggcccctccagccctgagagcagtgaggatgagggcccaggccgcagctccagccccctccgcctggtgcccttctccagccccaggccccccggagagccgccgggtggggagcccctgatggaggactgcgagaagagcagcgacacttgcaaccccctgtcaggcgccttctcaggagtgtccaacattttcagcttctggggggacagtcggggccgccagtaccaggagctccctcgatgccccgcccccacccccagcctcctcaacatccccctctccagcccgggtcggcggccccggggcgacgtggagagcaggctggatgccctccagcgccagctcaacaggctggagacccggctgagtgcagacatggccactgtcctgcagctgctacagaggcagatgacgctggtcccgcccgcctacagtgctgtgaccaccccggggcctggccccacttccacatccccgctgttgcccgtcagccccctccccaccctcaccttggactcgctttctcaggtttcccagttcatggcgtgtgaggagctgcccccgggggccccagagcttccccaagaaggccccacacgacgcctctccctaccgggccagctgggggccctcacctcccagcccctgcacagacacggctcggacccgggcagttagtggggctgcccagtgtggacacgtggctcacccagggatcaaggcgctgctgggccgctccccttggaggccctgctcaggaggccctgaccgtggaaggggagaggaactcgaaagcacagctcctcccccagcccttgggaccatcttctcctgcagtcccctgggccccagtgagaggggcaggggcagggccggcagtaggtggggcctgtggtccccccactgccctgagggcattagctggtctaactgcccggaggcacccggccctgggccttaggcacctcaaggacttttctgctatttactgctcttattgttaaggataataattaaggatcatatgaataattaatgaagatgctgatgactatgaataataaataattatcctgaggaga

SEQ ID NO: 904 - DNA, 3884 bp, Homo sapiens
  source 1..3884: mol_type = genomic DNA
  misc_feature 1..3884: note = cDNA of KCNH2 gene SNP c.460T>C (p.Trp154Arg)
atgccggtgcggaggggccacgtcgcgccgcagaacaccttcctggacaccatcatccgcaagtttgagggccagagccgtaagttcatcatcgccaacgctcgggtggagaactgcgccgtcatctactgcaacgacggcttctgcgagctgtgcggctactcgcgggccgaggtgatgcagcgaccctgcacctgcgacttcctgcacgggccgcgcacgcagcgccgcgctgccgcgcagatcgcgcaggcactgctgggcgccgaggagcgcaaagtggaaatcgccttctaccggaaagatgggagctgcttcctatgtctggtggatgtggtgcccgtgaagaacgaggatggggctgtcatcatgttcatcctcaatttcgaggtggtgatggagaaggacatggtggggtccccggctcatgacaccaaccaccggggcccccccaccagccggctggccccaggccgcgccaagaccttccgcctgaagctgcccgcgctgctggcgctgacggcccgggagtcgtcggtgcggtcgggcggcgcgggcggcgcgggcgccccgggggccgtggtggtggacgtggacctgacgcccgcggcacccagcagcgagtcgctggccctggacgaagtgacagccatggacaaccacgtggcagggctcgggcccgcggaggagcggcgtgcgctggtgggtcccggctctccgccccgcagcgcgcccggccagctcccatcgccccgggcgcacagcctcaaccccgacgcctcgggctccagctgcagcctggcccggacgcgctcccgagaaagctgcgccagcgtgcgccgcgcctcgtcggccgacgacatcgaggccatgcgcgccggggtgctgcccccgccaccgcgccacgccagcaccggggccatgcacccactgcgcagcggcttgctcaactccacctcggactccgacctcgtgcgctaccgcaccattagcaagattccccaaatcaccctcaactttgtggacctcaagggcgaccccttcttggcttcgcccaccagtgaccgtgagatcatagcacctaagataaaggagcgaacccacaatgtcactgagaaggtcacccaggtcctgtccctgggcgccgacgtgctgcctgagtacaagctgcaggcaccgcgcatccaccgctggaccatcctgcattacagccccttcaaggccgtgtgggactggctcatcctgctgctggtcatctacacggctgtcttcacaccctactcggctgccttcctgctgaaggagacggaagaaggcccgcctgctaccgagtgtggctacgcctgccagccgctggctgtggtggacctcatcgtggacatcatgttcattgtggacatcctcatcaacttccgcaccacctacgtcaatgccaacgaggaggtggtcagccaccccggccgcatcgccgtccactacttcaagggctggttcctcatcgacatggtggccgccatccccttcgacctgctcatcttcggctctggctctgaggagctgatcgggctgctgaagactgcgcggctgctgcggctggtgcgcgtggcgcggaagctggatcgctactcagagtacggcgcggccgtgctgttcttgctcatgtgcacctttgcgctcatcgcgcactggctagcctgcatctggtacgccatcggcaacatggagcagccacacatggactcacgcatcggctggctgcacaacctgggcgaccagataggcaaaccctacaacagcagcggcctgggcggcccctccatcaaggacaagtatgtgacggcgctctacttcaccttcagcagcctcaccagtgtgggcttcggcaacgtctctcccaacaccaactcagagaagatcttctccatctgcgtcatgctcattggctccctcatgtatgctagcatcttcggcaacgtgtcggccatcatccagcggctgtactcgggcacagcccgctaccacacacagatgctgcgggtgcgggagttcatccgcttccaccagatccccaatcccctgcgccagcgcctcgaggagtacttccagcacgcctggtcctacaccaacggcatcgacatgaacgcggtgctgaagggcttccctgagtgcctgcaggctgacatctgcctgcacctgaaccgctcactgctgcagcactgcaaacccttccgaggggccaccaagggctgccttcgggccctggccatgaagttcaagaccacacatgcaccgccaggggacacactggtgcatgctggggacctgctcaccgccctgtacttcatctcccggggctccatcgagatcctgcggggcgacgtcgtcgtggccatcctggggaagaatgacatctttggggagcctctgaacctgtatgcaaggcctggcaagtcgaacggggatgtgcgggccctcacctactgtgacctacacaagatccatcgggacgacctgctggaggtgctggacatgtaccctgagttctccgaccacttctggtccagcctggagatcaccttcaacctgcgagataccaacatgatcccgggctcccccggcagtacggagttagagggtggcttcagtcggcaacgcaagcgcaagttgtccttccgcaggcgcacggacaaggacacggagcagccaggggaggtgtcggccttggggccgggccgggcgggggcagggccgagtagccggggccggccgggggggccgtggggggagagcccgtccagtggcccctccagccctgagagcagtgaggatgagggcccaggccgcagctccagccccctccgcctggtgcccttctccagccccaggccccccggagagccgccgggtggggagcccctgatggaggactgcgagaagagcagcgacacttgcaaccccctgtcaggcgccttctcaggagtgtccaacattttcagcttctggggggacagtcggggccgccagtaccaggagctccctcgatgccccgcccccacccccagcctcctcaacatccccctctccagcccgggtcggcggccccggggcgacgtggagagcaggctggatgccctccagcgccagctcaacaggctggagacccggctgagtgcagacatggccactgtcctgcagctgctacagaggcagatgacgctggtcccgcccgcctacagtgctgtgaccaccccggggcctggccccacttccacatccccgctgttgcccgtcagccccctccccaccctcaccttggactcgctttctcaggtttcccagttcatggcgtgtgaggagctgcccccgggggccccagagcttccccaagaaggccccacacgacgcctctccctaccgggccagctgggggccctcacctcccagcccctgcacagacacggctcggacccgggcagttagtggggctgcccagtgtggacacgtggctcacccagggatcaaggcgctgctgggccgctccccttggaggccctgctcaggaggccctgaccgtggaaggggagaggaactcgaaagcacagctcctcccccagcccttgggaccatcttctcctgcagtcccctgggccccagtgagaggggcaggggcagggccggcagtaggtggggcctgtggtccccccactgccctgagggcattagctggtctaactgcccggaggcacccggccctgggccttaggcacctcaaggacttttctgctatttactgctcttattgttaaggataataattaaggatcatatgaataattaatgaagatgctgatgactatgaataataaataattatcctgaggaga

SEQ ID NO: 905 - DNA, 3884 bp, Homo sapiens
  source 1..3884: mol_type = genomic DNA
  misc_feature 1..3884: note = cDNA of KCNH2 gene SNP c.461G>A (p.Trp154Ter)
atgccggtgcggaggggccacgtcgcgccgcagaacaccttcctggacaccatcatccgcaagtttgagggccagagccgtaagttcatcatcgccaacgctcgggtggagaactgcgccgtcatctactgcaacgacggcttctgcgagctgtgcggctactcgcgggccgaggtgatgcagcgaccctgcacctgcgacttcctgcacgggccgcgcacgcagcgccgcgctgccgcgcagatcgcgcaggcactgctgggcgccgaggagcgcaaagtggaaatcgccttctaccggaaagatgggagctgcttcctatgtctggtggatgtggtgcccgtgaagaacgaggatggggctgtcatcatgttcatcctcaatttcgaggtggtgatggagaaggacatggtggggtccccggctcatgacaccaaccaccggggcccccccaccagctagctggccccaggccgcgccaagaccttccgcctgaagctgcccgcgctgctggcgctgacggcccgggagtcgtcggtgcggtcgggcggcgcgggcggcgcgggcgccccgggggccgtggtggtggacgtggacctgacgcccgcggcacccagcagcgagtcgctggccctggacgaagtgacagccatggacaaccacgtggcagggctcgggcccgcggaggagcggcgtgcgctggtgggtcccggctctccgccccgcagcgcgcccggccagctcccatcgccccgggcgcacagcctcaaccccgacgcctcgggctccagctgcagcctggcccggacgcgctcccgagaaagctgcgccagcgtgcgccgcgcctcgtcggccgacgacatcgaggccatgcgcgccggggtgctgcccccgccaccgcgccacgccagcaccggggccatgcacccactgcgcagcggcttgctcaactccacctcggactccgacctcgtgcgctaccgcaccattagcaagattccccaaatcaccctcaactttgtggacctcaagggcgaccccttcttggcttcgcccaccagtgaccgtgagatcatagcacctaagataaaggagcgaacccacaatgtcactgagaaggtcacccaggtcctgtccctgggcgccgacgtgctgcctgagtacaagctgcaggcaccgcgcatccaccgctggaccatcctgcattacagccccttcaaggccgtgtgggactggctcatcctgctgctggtcatctacacggctgtcttcacaccctactcggctgccttcctgctgaaggagacggaagaaggcccgcctgctaccgagtgtggctacgcctgccagccgctggctgtggtggacctcatcgtggacatcatgttcattgtggacatcctcatcaacttccgcaccacctacgtcaatgccaacgaggaggtggtcagccaccccggccgcatcgccgtccactacttcaagggctggttcctcatcgacatggtggccgccatccccttcgacctgctcatcttcggctctggctctgaggagctgatcgggctgctgaagactgcgcggctgctgcggctggtgcgcgtggcgcggaagctggatcgctactcagagtacggcgcggccgtgctgttcttgctcatgtgcacctttgcgctcatcgcgcactggctagcctgcatctggtacgccatcggcaacatggagcagccacacatggactcacgcatcggctggctgcacaacctgggcgaccagataggcaaaccctacaacagcagcggcctgggcggcccctccatcaaggacaagtatgtgacggcgctctacttcaccttcagcagcctcaccagtgtgggcttcggcaacgtctctcccaacaccaactcagagaagatcttctccatctgcgtcatgctcattggctccctcatgtatgctagcatcttcggcaacgtgtcggccatcatccagcggctgtactcgggcacagcccgctaccacacacagatgctgcgggtgcgggagttcatccgcttccaccagatccccaatcccctgcgccagcgcctcgaggagtacttccagcacgcctggtcctacaccaacggcatcgacatgaacgcggtgctgaagggcttccctgagtgcctgcaggctgacatctgcctgcacctgaaccgctcactgctgcagcactgcaaacccttccgaggggccaccaagggctgccttcgggccctggccatgaagttcaagaccacacatgcaccgccaggggacacactggtgcatgctggggacctgctcaccgccctgtacttcatctcccggggctccatcgagatcctgcggggcgacgtcgtcgtggccatcctggggaagaatgacatctttggggagcctctgaacctgtatgcaaggcctggcaagtcgaacggggatgtgcgggccctcacctactgtgacctacacaagatccatcgggacgacctgctggaggtgctggacatgtaccctgagttctccgaccacttctggtccagcctggagatcaccttcaacctgcgagataccaacatgatcccgggctcccccggcagtacggagttagagggtggcttcagtcggcaacgcaagcgcaagttgtccttccgcaggcgcacggacaaggacacggagcagccaggggaggtgtcggccttggggccgggccgggcgggggcagggccgagtagccggggccggccgggggggccgtggggggagagcccgtccagtggcccctccagccctgagagcagtgaggatgagggcccaggccgcagctccagccccctccgcctggtgcccttctccagccccaggccccccggagagccgccgggtggggagcccctgatggaggactgcgagaagagcagcgacacttgcaaccccctgtcaggcgccttctcaggagtgtccaacattttcagcttctggggggacagtcggggccgccagtaccaggagctccctcgatgccccgcccccacccccagcctcctcaacatccccctctccagcccgggtcggcggccccggggcgacgtggagagcaggctggatgccctccagcgccagctcaacaggctggagacccggctgagtgcagacatggccactgtcctgcagctgctacagaggcagatgacgctggtcccgcccgcctacagtgctgtgaccaccccggggcctggccccacttccacatccccgctgttgcccgtcagccccctccccaccctcaccttggactcgctttctcaggtttcccagttcatggcgtgtgaggagctgcccccgggggccccagagcttccccaagaaggccccacacgacgcctctccctaccgggccagctgggggccctcacctcccagcccctgcacagacacggctcggacccgggcagttagtggggctgcccagtgtggacacgtggctcacccagggatcaaggcgctgctgggccgctccccttggaggccctgctcaggaggccctgaccgtggaaggggagaggaactcgaaagcacagctcctcccccagcccttgggaccatcttctcctgcagtcccctgggccccagtgagaggggcaggggcagggccggcagtaggtggggcctgtggtccccccactgccctgagggcattagctggtctaactgcccggaggcacccggccctgggccttaggcacctcaaggacttttctgctatttactgctcttattgttaaggataataattaaggatcatatgaataattaatgaagatgctgatgactatgaataataaataattatcctgaggaga

SEQ ID NO: 906 - DNA, 3884 bp, Homo sapiens
  source 1..3884: mol_type = genomic DNA
  misc_feature 1..3884: note = cDNA of KCNH2 gene SNP c.478G>T (p.Ala160Ser)
atgccggtgcggaggggccacgtcgcgccgcagaacaccttcctggacaccatcatccgcaagtttgagggccagagccgtaagttcatcatcgccaacgctcgggtggagaactgcgccgtcatctactgcaacgacggcttctgcgagctgtgcggctactcgcgggccgaggtgatgcagcgaccctgcacctgcgacttcctgcacgggccgcgcacgcagcgccgcgctgccgcgcagatcgcgcaggcactgctgggcgccgaggagcgcaaagtggaaatcgccttctaccggaaagatgggagctgcttcctatgtctggtggatgtggtgcccgtgaagaacgaggatggggctgtcatcatgttcatcctcaatttcgaggtggtgatggagaaggacatggtggggtccccggctcatgacaccaaccaccggggcccccccaccagctggctggccccaggccgctccaagaccttccgcctgaagctgcccgcgctgctggcgctgacggcccgggagtcgtcggtgcggtcgggcggcgcgggcggcgcgggcgccccgggggccgtggtggtggacgtggacctgacgcccgcggcacccagcagcgagtcgctggccctggacgaagtgacagccatggacaaccacgtggcagggctcgggcccgcggaggagcggcgtgcgctggtgggtcccggctctccgccccgcagcgcgcccggccagctcccatcgccccgggcgcacagcctcaaccccgacgcctcgggctccagctgcagcctggcccggacgcgctcccgagaaagctgcgccagcgtgcgccgcgcctcgtcggccgacgacatcgaggccatgcgcgccggggtgctgcccccgccaccgcgccacgccagcaccggggccatgcacccactgcgcagcggcttgctcaactccacctcggactccgacctcgtgcgctaccgcaccattagcaagattccccaaatcaccctcaactttgtggacctcaagggcgaccccttcttggcttcgcccaccagtgaccgtgagatcatagcacctaagataaaggagcgaacccacaatgtcactgagaaggtcacccaggtcctgtccctgggcgccgacgtgctgcctgagtacaagctgcaggcaccgcgcatccaccgctggaccatcctgcattacagccccttcaaggccgtgtgggactggctcatcctgctgctggtcatctacacggctgtcttcacaccctactcggctgccttcctgctgaaggagacggaagaaggcccgcctgctaccgagtgtggctacgcctgccagccgctggctgtggtggacctcatcgtggacatcatgttcattgtggacatcctcatcaacttccgcaccacctacgtcaatgccaacgaggaggtggtcagccaccccggccgcatcgccgtccactacttcaagggctggttcctcatcgacatggtggccgccatccccttcgacctgctcatcttcggctctggctctgaggagctgatcgggctgctgaagactgcgcggctgctgcggctggtgcgcgtggcgcggaagctggatcgctactcagagtacggcgcggccgtgctgttcttgctcatgtgcacctttgcgctcatcgcgcactggctagcctgcatctggtacgccatcggcaacatggagcagccacacatggactcacgcatcggctggctgcacaacctgggcgaccagataggcaaaccctacaacagcagcggcctgggcggcccctccatcaaggacaagtatgtgacggcgctctacttcaccttcagcagcctcaccagtgtgggcttcggcaacgtctctcccaacaccaactcagagaagatcttctccatctgcgtcatgctcattggctccctcatgtatgctagcatcttcggcaacgtgtcggccatcatccagcggctgtactcgggcacagcccgctaccacacacagatgctgcgggtgcgggagttcatccgcttccaccagatccccaatcccctgcgccagcgcctcgaggagtacttccagcacgcctggtcctacaccaacggcatcgacatgaacgcggtgctgaagggcttccctgagtgcctgcaggctgacatctgcctgcacctgaaccgctcactgctgcagcactgcaaacccttccgaggggccaccaagggctgccttcgggccctggccatgaagttcaagaccacacatgcaccgccaggggacacactggtgcatgctggggacctgctcaccgccctgtacttcatctcccggggctccatcgagatcctgcggggcgacgtcgtcgtggccatcctggggaagaatgacatctttggggagcctctgaacctgtatgcaaggcctggcaagtcgaacggggatgtgcgggccctcacctactgtgacctacacaagatccatcgggacgacctgctggaggtgctggacatgtaccctgagttctccgaccacttctggtccagcctggagatcaccttcaacctgcgagataccaacatgatcccgggctcccccggcagtacggagttagagggtggcttcagtcggcaacgcaagcgcaagttgtccttccgcaggcgcacggacaaggacacggagcagccaggggaggtgtcggccttggggccgggccgggcgggggcagggccgagtagccggggccggccgggggggccgtggggggagagcccgtccagtggcccctccagccctgagagcagtgaggatgagggcccaggccgcagctccagccccctccgcctggtgcccttctccagccccaggccccccggagagccgccgggtggggagcccctgatggaggactgcgagaagagcagcgacacttgcaaccccctgtcaggcgccttctcaggagtgtccaacattttcagcttctggggggacagtcggggccgccagtaccaggagctccctcgatgccccgcccccacccccagcctcctcaacatccccctctccagcccgggtcggcggccccggggcgacgtggagagcaggctggatgccctccagcgccagctcaacaggctggagacccggctgagtgcagacatggccactgtcctgcagctgctacagaggcagatgacgctggtcccgcccgcctacagtgctgtgaccaccccggggcctggccccacttccacatccccgctgttgcccgtcagccccctccccaccctcaccttggactcgctttctcaggtttcccagttcatggcgtgtgaggagctgcccccgggggccccagagcttccccaagaaggccccacacgacgcctctccctaccgggccagctgggggccctcacctcccagcccctgcacagacacggctcggacccgggcagttagtggggctgcccagtgtggacacgtggctcacccagggatcaaggcgctgctgggccgctccccttggaggccctgctcaggaggccctgaccgtggaaggggagaggaactcgaaagcacagctcctcccccagcccttgggaccatcttctcctgcagtcccctgggccccagtgagaggggcaggggcagggccggcagtaggtggggcctgtggtccccccactgccctgagggcattagctggtctaactgcccggaggcacccggccctgggccttaggcacctcaaggacttttctgctatttactgctcttattgttaaggataataattaaggatcatatgaataattaatgaagatgctgatgactatgaataataaataattatcctgaggaga

SEQ ID NO: 907 - DNA, 3884 bp, Homo sapiens
  source 1..3884: mol_type = genomic DNA
  misc_feature 1..3884: note = cDNA of KCNH2 gene SNP c.47A>C (p.Asp16Ala)
atgccggtgcggaggggccacgtcgcgccgcagaacaccttcctggccaccatcatccgcaagtttgagggccagagccgtaagttcatcatcgccaacgctcgggtggagaactgcgccgtcatctactgcaacgacggcttctgcgagctgtgcggctactcgcgggccgaggtgatgcagcgaccctgcacctgcgacttcctgcacgggccgcgcacgcagcgccgcgctgccgcgcagatcgcgcaggcactgctgggcgccgaggagcgcaaagtggaaatcgccttctaccggaaagatgggagctgcttcctatgtctggtggatgtggtgcccgtgaagaacgaggatggggctgtcatcatgttcatcctcaatttcgaggtggtgatggagaaggacatggtggggtccccggctcatgacaccaaccaccggggcccccccaccagctggctggccccaggccgcgccaagaccttccgcctgaagctgcccgcgctgctggcgctgacggcccgggagtcgtcggtgcggtcgggcggcgcgggcggcgcgggcgccccgggggccgtggtggtggacgtggacctgacgcccgcggcacccagcagcgagtcgctggccctggacgaagtgacagccatggacaaccacgtggcagggctcgggcccgcggaggagcggcgtgcgctggtgggtcccggctctccgccccgcagcgcgcccggccagctcccatcgccccgggcgcacagcctcaaccccgacgcctcgggctccagctgcagcctggcccggacgcgctcccgagaaagctgcgccagcgtgcgccgcgcctcgtcggccgacgacatcgaggccatgcgcgccggggtgctgcccccgccaccgcgccacgccagcaccggggccatgcacccactgcgcagcggcttgctcaactccacctcggactccgacctcgtgcgctaccgcaccattagcaagattccccaaatcaccctcaactttgtggacctcaagggcgaccccttcttggcttcgcccaccagtgaccgtgagatcatagcacctaagataaaggagcgaacccacaatgtcactgagaaggtcacccaggtcctgtccctgggcgccgacgtgctgcctgagtacaagctgcaggcaccgcgcatccaccgctggaccatcctgcattacagccccttcaaggccgtgtgggactggctcatcctgctgctggtcatctacacggctgtcttcacaccctactcggctgccttcctgctgaaggagacggaagaaggcccgcctgctaccgagtgtggctacgcctgccagccgctggctgtggtggacctcatcgtggacatcatgttcattgtggacatcctcatcaacttccgcaccacctacgtcaatgccaacgaggaggtggtcagccaccccggccgcatcgccgtccactacttcaagggctggttcctcatcgacatggtggccgccatccccttcgacctgctcatcttcggctctggctctgaggagctgatcgggctgctgaagactgcgcggctgctgcggctggtgcgcgtggcgcggaagctggatcgctactcagagtacggcgcggccgtgctgttcttgctcatgtgcacctttgcgctcatcgcgcactggctagcctgcatctggtacgccatcggcaacatggagcagccacacatggactcacgcatcggctggctgcacaacctgggcgaccagataggcaaaccctacaacagcagcggcctgggcggcccctccatcaaggacaagtatgtgacggcgctctacttcaccttcagcagcctcaccagtgtgggcttcggcaacgtctctcccaacaccaactcagagaagatcttctccatctgcgtcatgctcattggctccctcatgtatgctagcatcttcggcaacgtgtcggccatcatccagcggctgtactcgggcacagcccgctaccacacacagatgctgcgggtgcgggagttcatccgcttccaccagatccccaatcccctgcgccagcgcctcgaggagtacttccagcacgcctggtcctacaccaacggcatcgacatgaacgcggtgctgaagggcttccctgagtgcctgcaggctgacatctgcctgcacctgaaccgctcactgctgcagcactgcaaacccttccgaggggccaccaagggctgccttcgggccctggccatgaagttcaagaccacacatgcaccgccaggggacacactggtgcatgctggggacctgctcaccgccctgtacttcatctcccggggctccatcgagatcctgcggggcgacgtcgtcgtggccatcctggggaagaatgacatctttggggagcctctgaacctgtatgcaaggcctggcaagtcgaacggggatgtgcgggccctcacctactgtgacctacacaagatccatcgggacgacctgctggaggtgctggacatgtaccctgagttctccgaccacttctggtccagcctggagatcaccttcaacctgcgagataccaacatgatcccgggctcccccggcagtacggagttagagggtggcttcagtcggcaacgcaagcgcaagttgtccttccgcaggcgcacggacaaggacacggagcagccaggggaggtgtcggccttggggccgggccgggcgggggcagggccgagtagccggggccggccgggggggccgtggggggagagcccgtccagtggcccctccagccctgagagcagtgaggatgagggcccaggccgcagctccagccccctccgcctggtgcccttctccagccccaggccccccggagagccgccgggtggggagcccctgatggaggactgcgagaagagcagcgacacttgcaaccccctgtcaggcgccttctcaggagtgtccaacattttcagcttctggggggacagtcggggccgccagtaccaggagctccctcgatgccccgcccccacccccagcctcctcaacatccccctctccagcccgggtcggcggccccggggcgacgtggagagcaggctggatgccctccagcgccagctcaacaggctggagacccggctgagtgcagacatggccactgtcctgcagctgctacagaggcagatgacgctggtcccgcccgcctacagtgctgtgaccaccccggggcctggccccacttccacatccccgctgttgcccgtcagccccctccccaccctcaccttggactcgctttctcaggtttcccagttcatggcgtgtgaggagctgcccccgggggccccagagcttccccaagaaggccccacacgacgcctctccctaccgggccagctgggggccctcacctcccagcccctgcacagacacggctcggacccgggcagttagtggggctgcccagtgtggacacgtggctcacccagggatcaaggcgctgctgggccgctccccttggaggccctgctcaggaggccctgaccgtggaaggggagaggaactcgaaagcacagctcctcccccagcccttgggaccatcttctcctgcagtcccctgggccccagtgagaggggcaggggcagggccggcagtaggtggggcctgtggtccccccactgccctgagggcattagctggtctaactgcccggaggcacccggccctgggccttaggcacctcaaggacttttctgctatttactgctcttattgttaaggataataattaaggatcatatgaataattaatgaagatgctgatgactatgaataataaataattatcctgaggaga

SEQ ID NO: 908 - DNA, 3884 bp, Homo sapiens
  source 1..3884: mol_type = genomic DNA
  misc_feature 1..3884: note = cDNA of KCNH2 gene SNP c.491G>A (p.Arg164His)
atgccggtgcggaggggccacgtcgcgccgcagaacaccttcctggacaccatcatccgcaagtttgagggccagagccgtaagttcatcatcgccaacgctcgggtggagaactgcgccgtcatctactgcaacgacggcttctgcgagctgtgcggctactcgcgggccgaggtgatgcagcgaccctgcacctgcgacttcctgcacgggccgcgcacgcagcgccgcgctgccgcgcagatcgcgcaggcactgctgggcgccgaggagcgcaaagtggaaatcgccttctaccggaaagatgggagctgcttcctatgtctggtggatgtggtgcccgtgaagaacgaggatggggctgtcatcatgttcatcctcaatttcgaggtggtgatggagaaggacatggtggggtccccggctcatgacaccaaccaccggggcccccccaccagctggctggccccaggccgcgccaagaccttccacctgaagctgcccgcgctgctggcgctgacggcccgggagtcgtcggtgcggtcgggcggcgcgggcggcgcgggcgccccgggggccgtggtggtggacgtggacctgacgcccgcggcacccagcagcgagtcgctggccctggacgaagtgacagccatggacaaccacgtggcagggctcgggcccgcggaggagcggcgtgcgctggtgggtcccggctctccgccccgcagcgcgcccggccagctcccatcgccccgggcgcacagcctcaaccccgacgcctcgggctccagctgcagcctggcccggacgcgctcccgagaaagctgcgccagcgtgcgccgcgcctcgtcggccgacgacatcgaggccatgcgcgccggggtgctgcccccgccaccgcgccacgccagcaccggggccatgcacccactgcgcagcggcttgctcaactccacctcggactccgacctcgtgcgctaccgcaccattagcaagattccccaaatcaccctcaactttgtggacctcaagggcgaccccttcttggcttcgcccaccagtgaccgtgagatcatagcacctaagataaaggagcgaacccacaatgtcactgagaaggtcacccaggtcctgtccctgggcgccgacgtgctgcctgagtacaagctgcaggcaccgcgcatccaccgctggaccatcctgcattacagccccttcaaggccgtgtgggactggctcatcctgctgctggtcatctacacggctgtcttcacaccctactcggctgccttcctgctgaaggagacggaagaaggcccgcctgctaccgagtgtggctacgcctgccagccgctggctgtggtggacctcatcgtggacatcatgttcattgtggacatcctcatcaacttccgcaccacctacgtcaatgccaacgaggaggtggtcagccaccccggccgcatcgccgtccactacttcaagggctggttcctcatcgacatggtggccgccatccccttcgacctgctcatcttcggctctggctctgaggagctgatcgggctgctgaagactgcgcggctgctgcggctggtgcgcgtggcgcggaagctggatcgctactcagagtacggcgcggccgtgctgttcttgctcatgtgcacctttgcgctcatcgcgcactggctagcctgcatctggtacgccatcggcaacatggagcagccacacatggactcacgcatcggctggctgcacaacctgggcgaccagataggcaaaccctacaacagcagcggcctgggcggcccctccatcaaggacaagtatgtgacggcgctctacttcaccttcagcagcctcaccagtgtgggcttcggcaacgtctctcccaacaccaactcagagaagatcttctccatctgcgtcatgctcattggctccctcatgtatgctagcatcttcggcaacgtgtcggccatcatccagcggctgtactcgggcacagcccgctaccacacacagatgctgcgggtgcgggagttcatccgcttccaccagatccccaatcccctgcgccagcgcctcgaggagtacttccagcacgcctggtcctacaccaacggcatcgacatgaacgcggtgctgaagggcttccctgagtgcctgcaggctgacatctgcctgcacctgaaccgctcactgctgcagcactgcaaacccttccgaggggccaccaagggctgccttcgggccctggccatgaagttcaagaccacacatgcaccgccaggggacacactggtgcatgctggggacctgctcaccgccctgtacttcatctcccggggctccatcgagatcctgcggggcgacgtcgtcgtggccatcctggggaagaatgacatctttggggagcctctgaacctgtatgcaaggcctggcaagtcgaacggggatgtgcgggccctcacctactgtgacctacacaagatccatcgggacgacctgctggaggtgctggacatgtaccctgagttctccgaccacttctggtccagcctggagatcaccttcaacctgcgagataccaacatgatcccgggctcccccggcagtacggagttagagggtggcttcagtcggcaacgcaagcgcaagttgtccttccgcaggcgcacggacaaggacacggagcagccaggggaggtgtcggccttggggccgggccgggcgggggcagggccgagtagccggggccggccgggggggccgtggggggagagcccgtccagtggcccctccagccctgagagcagtgaggatgagggcccaggccgcagctccagccccctccgcctggtgcccttctccagccccaggccccccggagagccgccgggtggggagcccctgatggaggactgcgagaagagcagcgacacttgcaaccccctgtcaggcgccttctcaggagtgtccaacattttcagcttctggggggacagtcggggccgccagtaccaggagctccctcgatgccccgcccccacccccagcctcctcaacatccccctctccagcccgggtcggcggccccggggcgacgtggagagcaggctggatgccctccagcgccagctcaacaggctggagacccggctgagtgcagacatggccactgtcctgcagctgctacagaggcagatgacgctggtcccgcccgcctacagtgctgtgaccaccccggggcctggccccacttccacatccccgctgttgcccgtcagccccctccccaccctcaccttggactcgctttctcaggtttcccagttcatggcgtgtgaggagctgcccccgggggccccagagcttccccaagaaggccccacacgacgcctctccctaccgggccagctgggggccctcacctcccagcccctgcacagacacggctcggacccgggcagttagtggggctgcccagtgtggacacgtggctcacccagggatcaaggcgctgctgggccgctccccttggaggccctgctcaggaggccctgaccgtggaaggggagaggaactcgaaagcacagctcctcccccagcccttgggaccatcttctcctgcagtcccctgggccccagtgagaggggcaggggcagggccggcagtaggtggggcctgtggtccccccactgccctgagggcattagctggtctaactgcccggaggcacccggccctgggccttaggcacctcaaggacttttctgctatttactgctcttattgttaaggataataattaaggatcatatgaataattaatgaagatgctgatgactatgaataataaataattatcctgaggaga

SEQ ID NO: 909 - DNA, 3884 bp, Homo sapiens
  source 1..3884: mol_type = genomic DNA
  misc_feature 1..3884: note = cDNA of KCNH2 gene SNP c.499C>G (p.Leu167Val)
atgccggtgcggaggggccacgtcgcgccgcagaacaccttcctggacaccatcatccgcaagtttgagggccagagccgtaagttcatcatcgccaacgctcgggtggagaactgcgccgtcatctactgcaacgacggcttctgcgagctgtgcggctactcgcgggccgaggtgatgcagcgaccctgcacctgcgacttcctgcacgggccgcgcacgcagcgccgcgctgccgcgcagatcgcgcaggcactgctgggcgccgaggagcgcaaagtggaaatcgccttctaccggaaagatgggagctgcttcctatgtctggtggatgtggtgcccgtgaagaacgaggatggggctgtcatcatgttcatcctcaatttcgaggtggtgatggagaaggacatggtggggtccccggctcatgacaccaaccaccggggcccccccaccagctggctggccccaggccgcgccaagaccttccgcctgaaggtgcccgcgctgctggcgctgacggcccgggagtcgtcggtgcggtcgggcggcgcgggcggcgcgggcgccccgggggccgtggtggtggacgtggacctgacgcccgcggcacccagcagcgagtcgctggccctggacgaagtgacagccatggacaaccacgtggcagggctcgggcccgcggaggagcggcgtgcgctggtgggtcccggctctccgccccgcagcgcgcccggccagctcccatcgccccgggcgcacagcctcaaccccgacgcctcgggctccagctgcagcctggcccggacgcgctcccgagaaagctgcgccagcgtgcgccgcgcctcgtcggccgacgacatcgaggccatgcgcgccggggtgctgcccccgccaccgcgccacgccagcaccggggccatgcacccactgcgcagcggcttgctcaactccacctcggactccgacctcgtgcgctaccgcaccattagcaagattccccaaatcaccctcaactttgtggacctcaagggcgaccccttcttggcttcgcccaccagtgaccgtgagatcatagcacctaagataaaggagcgaacccacaatgtcactgagaaggtcacccaggtcctgtccctgggcgccgacgtgctgcctgagtacaagctgcaggcaccgcgcatccaccgctggaccatcctgcattacagccccttcaaggccgtgtgggactggctcatcctgctgctggtcatctacacggctgtcttcacaccctactcggctgccttcctgctgaaggagacggaagaaggcccgcctgctaccgagtgtggctacgcctgccagccgctggctgtggtggacctcatcgtggacatcatgttcattgtggacatcctcatcaacttccgcaccacctacgtcaatgccaacgaggaggtggtcagccaccccggccgcatcgccgtccactacttcaagggctggttcctcatcgacatggtggccgccatccccttcgacctgctcatcttcggctctggctctgaggagctgatcgggctgctgaagactgcgcggctgctgcggctggtgcgcgtggcgcggaagctggatcgctactcagagtacggcgcggccgtgctgttcttgctcatgtgcacctttgcgctcatcgcgcactggctagcctgcatctggtacgccatcggcaacatggagcagccacacatggactcacgcatcggctggctgcacaacctgggcgaccagataggcaaaccctacaacagcagcggcctgggcggcccctccatcaaggacaagtatgtgacggcgctctacttcaccttcagcagcctcaccagtgtgggcttcggcaacgtctctcccaacaccaactcagagaagatcttctccatctgcgtcatgctcattggctccctcatgtatgctagcatcttcggcaacgtgtcggccatcatccagcggctgtactcgggcacagcccgctaccacacacagatgctgcgggtgcgggagttcatccgcttccaccagatccccaatcccctgcgccagcgcctcgaggagtacttccagcacgcctggtcctacaccaacggcatcgacatgaacgcggtgctgaagggcttccctgagtgcctgcaggctgacatctgcctgcacctgaaccgctcactgctgcagcactgcaaacccttccgaggggccaccaagggctgccttcgggccctggccatgaagttcaagaccacacatgcaccgccaggggacacactggtgcatgctggggacctgctcaccgccctgtacttcatctcccggggctccatcgagatcctgcggggcgacgtcgtcgtggccatcctggggaagaatgacatctttggggagcctctgaacctgtatgcaaggcctggcaagtcgaacggggatgtgcgggccctcacctactgtgacctacacaagatccatcgggacgacctgctggaggtgctggacatgtaccctgagttctccgaccacttctggtccagcctggagatcaccttcaacctgcgagataccaacatgatcccgggctcccccggcagtacggagttagagggtggcttcagtcggcaacgcaagcgcaagttgtccttccgcaggcgcacggacaaggacacggagcagccaggggaggtgtcggccttggggccgggccgggcgggggcagggccgagtagccggggccggccgggggggccgtggggggagagcccgtccagtggcccctccagccctgagagcagtgaggatgagggcccaggccgcagctccagccccctccgcctggtgcccttctccagccccaggccccccggagagccgccgggtggggagcccctgatggaggactgcgagaagagcagcgacacttgcaaccccctgtcaggcgccttctcaggagtgtccaacattttcagcttctggggggacagtcggggccgccagtaccaggagctccctcgatgccccgcccccacccccagcctcctcaacatccccctctccagcccgggtcggcggccccggggcgacgtggagagcaggctggatgccctccagcgccagctcaacaggctggagacccggctgagtgcagacatggccactgtcctgcagctgctacagaggcagatgacgctggtcccgcccgcctacagtgctgtgaccaccccggggcctggccccacttccacatccccgctgttgcccgtcagccccctccccaccctcaccttggactcgctttctcaggtttcccagttcatggcgtgtgaggagctgcccccgggggccccagagcttccccaagaaggccccacacgacgcctctccctaccgggccagctgggggccctcacctcccagcccctgcacagacacggctcggacccgggcagttagtggggctgcccagtgtggacacgtggctcacccagggatcaaggcgctgctgggccgctccccttggaggccctgctcaggaggccctgaccgtggaaggggagaggaactcgaaagcacagctcctcccccagcccttgggaccatcttctcctgcagtcccctgggccccagtgagaggggcaggggcagggccggcagtaggtggggcctgtggtccccccactgccctgagggcattagctggtctaactgcccggaggcacccggccctgggccttaggcacctcaaggacttttctgctatttactgctcttattgttaaggataataattaaggatcatatgaataattaatgaagatgctgatgactatgaataataaataattatcctgaggaga

SEQ ID NO: 910 - DNA, 3884 bp, Homo sapiens
  source 1..3884: mol_type = genomic DNA
  misc_feature 1..3884: note = cDNA of KCNH2 gene SNP c.515C>T (p.Ala172Val)
atgccggtgcggaggggccacgtcgcgccgcagaacaccttcctggacaccatcatccgcaagtttgagggccagagccgtaagttcatcatcgccaacgctcgggtggagaactgcgccgtcatctactgcaacgacggcttctgcgagctgtgcggctactcgcgggccgaggtgatgcagcgaccctgcacctgcgacttcctgcacgggccgcgcacgcagcgccgcgctgccgcgcagatcgcgcaggcactgctgggcgccgaggagcgcaaagtggaaatcgccttctaccggaaagatgggagctgcttcctatgtctggtggatgtggtgcccgtgaagaacgaggatggggctgtcatcatgttcatcctcaatttcgaggtggtgatggagaaggacatggtggggtccccggctcatgacaccaaccaccggggcccccccaccagctggctggccccaggccgcgccaagaccttccgcctgaagctgcccgcgctgctggtgctgacggcccgggagtcgtcggtgcggtcgggcggcgcgggcggcgcgggcgccccgggggccgtggtggtggacgtggacctgacgcccgcggcacccagcagcgagtcgctggccctggacgaagtgacagccatggacaaccacgtggcagggctcgggcccgcggaggagcggcgtgcgctggtgggtcccggctctccgccccgcagcgcgcccggccagctcccatcgccccgggcgcacagcctcaaccccgacgcctcgggctccagctgcagcctggcccggacgcgctcccgagaaagctgcgccagcgtgcgccgcgcctcgtcggccgacgacatcgaggccatgcgcgccggggtgctgcccccgccaccgcgccacgccagcaccggggccatgcacccactgcgcagcggcttgctcaactccacctcggactccgacctcgtgcgctaccgcaccattagcaagattccccaaatcaccctcaactttgtggacctcaagggcgaccccttcttggcttcgcccaccagtgaccgtgagatcatagcacctaagataaaggagcgaacccacaatgtcactgagaaggtcacccaggtcctgtccctgggcgccgacgtgctgcctgagtacaagctgcaggcaccgcgcatccaccgctggaccatcctgcattacagccccttcaaggccgtgtgggactggctcatcctgctgctggtcatctacacggctgtcttcacaccctactcggctgccttcctgctgaaggagacggaagaaggcccgcctgctaccgagtgtggctacgcctgccagccgctggctgtggtggacctcatcgtggacatcatgttcattgtggacatcctcatcaacttccgcaccacctacgtcaatgccaacgaggaggtggtcagccaccccggccgcatcgccgtccactacttcaagggctggttcctcatcgacatggtggccgccatccccttcgacctgctcatcttcggctctggctctgaggagctgatcgggctgctgaagactgcgcggctgctgcggctggtgcgcgtggcgcggaagctggatcgctactcagagtacggcgcggccgtgctgttcttgctcatgtgcacctttgcgctcatcgcgcactggctagcctgcatctggtacgccatcggcaacatggagcagccacacatggactcacgcatcggctggctgcacaacctgggcgaccagataggcaaaccctacaacagcagcggcctgggcggcccctccatcaaggacaagtatgtgacggcgctctacttcaccttcagcagcctcaccagtgtgggcttcggcaacgtctctcccaacaccaactcagagaagatcttctccatctgcgtcatgctcattggctccctcatgtatgctagcatcttcggcaacgtgtcggccatcatccagcggctgtactcgggcacagcccgctaccacacacagatgctgcgggtgcgggagttcatccgcttccaccagatccccaatcccctgcgccagcgcctcgaggagtacttccagcacgcctggtcctacaccaacggcatcgacatgaacgcggtgctgaagggcttccctgagtgcctgcaggctgacatctgcctgcacctgaaccgctcactgctgcagcactgcaaacccttccgaggggccaccaagggctgccttcgggccctggccatgaagttcaagaccacacatgcaccgccaggggacacactggtgcatgctggggacctgctcaccgccctgtacttcatctcccggggctccatcgagatcctgcggggcgacgtcgtcgtggccatcctggggaagaatgacatctttggggagcctctgaacctgtatgcaaggcctggcaagtcgaacggggatgtgcgggccctcacctactgtgacctacacaagatccatcgggacgacctgctggaggtgctggacatgtaccctgagttctccgaccacttctggtccagcctggagatcaccttcaacctgcgagataccaacatgatcccgggctcccccggcagtacggagttagagggtggcttcagtcggcaacgcaagcgcaagttgtccttccgcaggcgcacggacaaggacacggagcagccaggggaggtgtcggccttggggccgggccgggcgggggcagggccgagtagccggggccggccgggggggccgtggggggagagcccgtccagtggcccctccagccctgagagcagtgaggatgagggcccaggccgcagctccagccccctccgcctggtgcccttctccagccccaggccccccggagagccgccgggtggggagcccctgatggaggactgcgagaagagcagcgacacttgcaaccccctgtcaggcgccttctcaggagtgtccaacattttcagcttctggggggacagtcggggccgccagtaccaggagctccctcgatgccccgcccccacccccagcctcctcaacatccccctctccagcccgggtcggcggccccggggcgacgtggagagcaggctggatgccctccagcgccagctcaacaggctggagacccggctgagtgcagacatggccactgtcctgcagctgctacagaggcagatgacgctggtcccgcccgcctacagtgctgtgaccaccccggggcctggccccacttccacatccccgctgttgcccgtcagccccctccccaccctcaccttggactcgctttctcaggtttcccagttcatggcgtgtgaggagctgcccccgggggccccagagcttccccaagaaggccccacacgacgcctctccctaccgggccagctgggggccctcacctcccagcccctgcacagacacggctcggacccgggcagttagtggggctgcccagtgtggacacgtggctcacccagggatcaaggcgctgctgggccgctccccttggaggccctgctcaggaggccctgaccgtggaaggggagaggaactcgaaagcacagctcctcccccagcccttgggaccatcttctcctgcagtcccctgggccccagtgagaggggcaggggcagggccggcagtaggtggggcctgtggtccccccactgccctgagggcattagctggtctaactgcccggaggcacccggccctgggccttaggcacctcaaggacttttctgctatttactgctcttattgttaaggataataattaaggatcatatgaataattaatgaagatgctgatgactatgaataataaataattatcctgaggaga

SEQ ID NO: 911 - DNA, 3884 bp, Homo sapiens
  source 1..3884: mol_type = genomic DNA
  misc_feature 1..3884: note = cDNA of KCNH2 gene SNP c.523G>A (p.Ala175Thr)
atgccggtgcggaggggccacgtcgcgccgcagaacaccttcctggacaccatcatccgcaagtttgagggccagagccgtaagttcatcatcgccaacgctcgggtggagaactgcgccgtcatctactgcaacgacggcttctgcgagctgtgcggctactcgcgggccgaggtgatgcagcgaccctgcacctgcgacttcctgcacgggccgcgcacgcagcgccgcgctgccgcgcagatcgcgcaggcactgctgggcgccgaggagcgcaaagtggaaatcgccttctaccggaaagatgggagctgcttcctatgtctggtggatgtggtgcccgtgaagaacgaggatggggctgtcatcatgttcatcctcaatttcgaggtggtgatggagaaggacatggtggggtccccggctcatgacaccaaccaccggggcccccccaccagctggctggccccaggccgcgccaagaccttccgcctgaagctgcccgcgctgctggcgctgacgacccgggagtcgtcggtgcggtcgggcggcgcgggcggcgcgggcgccccgggggccgtggtggtggacgtggacctgacgcccgcggcacccagcagcgagtcgctggccctggacgaagtgacagccatggacaaccacgtggcagggctcgggcccgcggaggagcggcgtgcgctggtgggtcccggctctccgccccgcagcgcgcccggccagctcccatcgccccgggcgcacagcctcaaccccgacgcctcgggctccagctgcagcctggcccggacgcgctcccgagaaagctgcgccagcgtgcgccgcgcctcgtcggccgacgacatcgaggccatgcgcgccggggtgctgcccccgccaccgcgccacgccagcaccggggccatgcacccactgcgcagcggcttgctcaactccacctcggactccgacctcgtgcgctaccgcaccattagcaagattccccaaatcaccctcaactttgtggacctcaagggcgaccccttcttggcttcgcccaccagtgaccgtgagatcatagcacctaagataaaggagcgaacccacaatgtcactgagaaggtcacccaggtcctgtccctgggcgccgacgtgctgcctgagtacaagctgcaggcaccgcgcatccaccgctggaccatcctgcattacagccccttcaaggccgtgtgggactggctcatcctgctgctggtcatctacacggctgtcttcacaccctactcggctgccttcctgctgaaggagacggaagaaggcccgcctgctaccgagtgtggctacgcctgccagccgctggctgtggtggacctcatcgtggacatcatgttcattgtggacatcctcatcaacttccgcaccacctacgtcaatgccaacgaggaggtggtcagccaccccggccgcatcgccgtccactacttcaagggctggttcctcatcgacatggtggccgccatccccttcgacctgctcatcttcggctctggctctgaggagctgatcgggctgctgaagactgcgcggctgctgcggctggtgcgcgtggcgcggaagctggatcgctactcagagtacggcgcggccgtgctgttcttgctcatgtgcacctttgcgctcatcgcgcactggctagcctgcatctggtacgccatcggcaacatggagcagccacacatggactcacgcatcggctggctgcacaacctgggcgaccagataggcaaaccctacaacagcagcggcctgggcggcccctccatcaaggacaagtatgtgacggcgctctacttcaccttcagcagcctcaccagtgtgggcttcggcaacgtctctcccaacaccaactcagagaagatcttctccatctgcgtcatgctcattggctccctcatgtatgctagcatcttcggcaacgtgtcggccatcatccagcggctgtactcgggcacagcccgctaccacacacagatgctgcgggtgcgggagttcatccgcttccaccagatccccaatcccctgcgccagcgcctcgaggagtacttccagcacgcctggtcctacaccaacggcatcgacatgaacgcggtgctgaagggcttccctgagtgcctgcaggctgacatctgcctgcacctgaaccgctcactgctgcagcactgcaaacccttccgaggggccaccaagggctgccttcgggccctggccatgaagttcaagaccacacatgcaccgccaggggacacactggtgcatgctggggacctgctcaccgccctgtacttcatctcccggggctccatcgagatcctgcggggcgacgtcgtcgtggccatcctggggaagaatgacatctttggggagcctctgaacctgtatgcaaggcctggcaagtcgaacggggatgtgcgggccctcacctactgtgacctacacaagatccatcgggacgacctgctggaggtgctggacatgtaccctgagttctccgaccacttctggtccagcctggagatcaccttcaacctgcgagataccaacatgatcccgggctcccccggcagtacggagttagagggtggcttcagtcggcaacgcaagcgcaagttgtccttccgcaggcgcacggacaaggacacggagcagccaggggaggtgtcggccttggggccgggccgggcgggggcagggccgagtagccggggccggccgggggggccgtggggggagagcccgtccagtggcccctccagccctgagagcagtgaggatgagggcccaggccgcagctccagccccctccgcctggtgcccttctccagccccaggccccccggagagccgccgggtggggagcccctgatggaggactgcgagaagagcagcgacacttgcaaccccctgtcaggcgccttctcaggagtgtccaacattttcagcttctggggggacagtcggggccgccagtaccaggagctccctcgatgccccgcccccacccccagcctcctcaacatccccctctccagcccgggtcggcggccccggggcgacgtggagagcaggctggatgccctccagcgccagctcaacaggctggagacccggctgagtgcagacatggccactgtcctgcagctgctacagaggcagatgacgctggtcccgcccgcctacagtgctgtgaccaccccggggcctggccccacttccacatccccgctgttgcccgtcagccccctccccaccctcaccttggactcgctttctcaggtttcccagttcatggcgtgtgaggagctgcccccgggggccccagagcttccccaagaaggccccacacgacgcctctccctaccgggccagctgggggccctcacctcccagcccctgcacagacacggctcggacccgggcagttagtggggctgcccagtgtggacacgtggctcacccagggatcaaggcgctgctgggccgctccccttggaggccctgctcaggaggccctgaccgtggaaggggagaggaactcgaaagcacagctcctcccccagcccttgggaccatcttctcctgcagtcccctgggccccagtgagaggggcaggggcagggccggcagtaggtggggcctgtggtccccccactgccctgagggcattagctggtctaactgcccggaggcacccggccctgggccttaggcacctcaaggacttttctgctatttactgctcttattgttaaggataataattaaggatcatatgaataattaatgaagatgctgatgactatgaataataaataattatcctgaggaga

SEQ ID NO: 912 - DNA, 3884 bp, Homo sapiens
  source 1..3884: mol_type = genomic DNA
  misc_feature 1..3884: note = cDNA of KCNH2 gene SNP c.523G>T (p.Ala175Ser)
atgccggtgcggaggggccacgtcgcgccgcagaacaccttcctggacaccatcatccgcaagtttgagggccagagccgtaagttcatcatcgccaacgctcgggtggagaactgcgccgtcatctactgcaacgacggcttctgcgagctgtgcggctactcgcgggccgaggtgatgcagcgaccctgcacctgcgacttcctgcacgggccgcgcacgcagcgccgcgctgccgcgcagatcgcgcaggcactgctgggcgccgaggagcgcaaagtggaaatcgccttctaccggaaagatgggagctgcttcctatgtctggtggatgtggtgcccgtgaagaacgaggatggggctgtcatcatgttcatcctcaatttcgaggtggtgatggagaaggacatggtggggtccccggctcatgacaccaaccaccggggcccccccaccagctggctggccccaggccgcgccaagaccttccgcctgaagctgcccgcgctgctggcgctgacgtcccgggagtcgtcggtgcggtcgggcggcgcgggcggcgcgggcgccccgggggccgtggtggtggacgtggacctgacgcccgcggcacccagcagcgagtcgctggccctggacgaagtgacagccatggacaaccacgtggcagggctcgggcccgcggaggagcggcgtgcgctggtgggtcccggctctccgccccgcagcgcgcccggccagctcccatcgccccgggcgcacagcctcaaccccgacgcctcgggctccagctgcagcctggcccggacgcgctcccgagaaagctgcgccagcgtgcgccgcgcctcgtcggccgacgacatcgaggccatgcgcgccggggtgctgcccccgccaccgcgccacgccagcaccggggccatgcacccactgcgcagcggcttgctcaactccacctcggactccgacctcgtgcgctaccgcaccattagcaagattccccaaatcaccctcaactttgtggacctcaagggcgaccccttcttggcttcgcccaccagtgaccgtgagatcatagcacctaagataaaggagcgaacccacaatgtcactgagaaggtcacccaggtcctgtccctgggcgccgacgtgctgcctgagtacaagctgcaggcaccgcgcatccaccgctggaccatcctgcattacagccccttcaaggccgtgtgggactggctcatcctgctgctggtcatctacacggctgtcttcacaccctactcggctgccttcctgctgaaggagacggaagaaggcccgcctgctaccgagtgtggctacgcctgccagccgctggctgtggtggacctcatcgtggacatcatgttcattgtggacatcctcatcaacttccgcaccacctacgtcaatgccaacgaggaggtggtcagccaccccggccgcatcgccgtccactacttcaagggctggttcctcatcgacatggtggccgccatccccttcgacctgctcatcttcggctctggctctgaggagctgatcgggctgctgaagactgcgcggctgctgcggctggtgcgcgtggcgcggaagctggatcgctactcagagtacggcgcggccgtgctgttcttgctcatgtgcacctttgcgctcatcgcgcactggctagcctgcatctggtacgccatcggcaacatggagcagccacacatggactcacgcatcggctggctgcacaacctgggcgaccagataggcaaaccctacaacagcagcggcctgggcggcccctccatcaaggacaagtatgtgacggcgctctacttcaccttcagcagcctcaccagtgtgggcttcggcaacgtctctcccaacaccaactcagagaagatcttctccatctgcgtcatgctcattggctccctcatgtatgctagcatcttcggcaacgtgtcggccatcatccagcggctgtactcgggcacagcccgctaccacacacagatgctgcgggtgcgggagttcatccgcttccaccagatccccaatcccctgcgccagcgcctcgaggagtacttccagcacgcctggtcctacaccaacggcatcgacatgaacgcggtgctgaagggcttccctgagtgcctgcaggctgacatctgcctgcacctgaaccgctcactgctgcagcactgcaaacccttccgaggggccaccaagggctgccttcgggccctggccatgaagttcaagaccacacatgcaccgccaggggacacactggtgcatgctggggacctgctcaccgccctgtacttcatctcccggggctccatcgagatcctgcggggcgacgtcgtcgtggccatcctggggaagaatgacatctttggggagcctctgaacctgtatgcaaggcctggcaagtcgaacggggatgtgcgggccctcacctactgtgacctacacaagatccatcgggacgacctgctggaggtgctggacatgtaccctgagttctccgaccacttctggtccagcctggagatcaccttcaacctgcgagataccaacatgatcccgggctcccccggcagtacggagttagagggtggcttcagtcggcaacgcaagcgcaagttgtccttccgcaggcgcacggacaaggacacggagcagccaggggaggtgtcggccttggggccgggccgggcgggggcagggccgagtagccggggccggccgggggggccgtggggggagagcccgtccagtggcccctccagccctgagagcagtgaggatgagggcccaggccgcagctccagccccctccgcctggtgcccttctccagccccaggccccccggagagccgccgggtggggagcccctgatggaggactgcgagaagagcagcgacacttgcaaccccctgtcaggcgccttctcaggagtgtccaacattttcagcttctggggggacagtcggggccgccagtaccaggagctccctcgatgccccgcccccacccccagcctcctcaacatccccctctccagcccgggtcggcggccccggggcgacgtggagagcaggctggatgccctccagcgccagctcaacaggctggagacccggctgagtgcagacatggccactgtcctgcagctgctacagaggcagatgacgctggtcccgcccgcctacagtgctgtgaccaccccggggcctggccccacttccacatccccgctgttgcccgtcagccccctccccaccctcaccttggactcgctttctcaggtttcccagttcatggcgtgtgaggagctgcccccgggggccccagagcttccccaagaaggccccacacgacgcctctccctaccgggccagctgggggccctcacctcccagcccctgcacagacacggctcggacccgggcagttagtggggctgcccagtgtggacacgtggctcacccagggatcaaggcgctgctgggccgctccccttggaggccctgctcaggaggccctgaccgtggaaggggagaggaactcgaaagcacagctcctcccccagcccttgggaccatcttctcctgcagtcccctgggccccagtgagaggggcaggggcagggccggcagtaggtggggcctgtggtccccccactgccctgagggcattagctggtctaactgcccggaggcacccggccctgggccttaggcacctcaaggacttttctgctatttactgctcttattgttaaggataataattaaggatcatatgaataattaatgaagatgctgatgactatgaataataaataattatcctgaggaga

SEQ ID NO: 913 - DNA, 3884 bp, Homo sapiens
  source 1..3884: mol_type = genomic DNA
  misc_feature 1..3884: note = cDNA of KCNH2 gene SNP c.524C>A (p.Ala175Asp)
atgccggtgcggaggggccacgtcgcgccgcagaacaccttcctggacaccatcatccgcaagtttgagggccagagccgtaagttcatcatcgccaacgctcgggtggagaactgcgccgtcatctactgcaacgacggcttctgcgagctgtgcggctactcgcgggccgaggtgatgcagcgaccctgcacctgcgacttcctgcacgggccgcgcacgcagcgccgcgctgccgcgcagatcgcgcaggcactgctgggcgccgaggagcgcaaagtggaaatcgccttctaccggaaagatgggagctgcttcctatgtctggtggatgtggtgcccgtgaagaacgaggatggggctgtcatcatgttcatcctcaatttcgaggtggtgatggagaaggacatggtggggtccccggctcatgacaccaaccaccggggcccccccaccagctggctggccccaggccgcgccaagaccttccgcctgaagctgcccgcgctgctggcgctgacggaccgggagtcgtcggtgcggtcgggcggcgcgggcggcgcgggcgccccgggggccgtggtggtggacgtggacctgacgcccgcggcacccagcagcgagtcgctggccctggacgaagtgacagccatggacaaccacgtggcagggctcgggcccgcggaggagcggcgtgcgctggtgggtcccggctctccgccccgcagcgcgcccggccagctcccatcgccccgggcgcacagcctcaaccccgacgcctcgggctccagctgcagcctggcccggacgcgctcccgagaaagctgcgccagcgtgcgccgcgcctcgtcggccgacgacatcgaggccatgcgcgccggggtgctgcccccgccaccgcgccacgccagcaccggggccatgcacccactgcgcagcggcttgctcaactccacctcggactccgacctcgtgcgctaccgcaccattagcaagattccccaaatcaccctcaactttgtggacctcaagggcgaccccttcttggcttcgcccaccagtgaccgtgagatcatagcacctaagataaaggagcgaacccacaatgtcactgagaaggtcacccaggtcctgtccctgggcgccgacgtgctgcctgagtacaagctgcaggcaccgcgcatccaccgctggaccatcctgcattacagccccttcaaggccgtgtgggactggctcatcctgctgctggtcatctacacggctgtcttcacaccctactcggctgccttcctgctgaaggagacggaagaaggcccgcctgctaccgagtgtggctacgcctgccagccgctggctgtggtggacctcatcgtggacatcatgttcattgtggacatcctcatcaacttccgcaccacctacgtcaatgccaacgaggaggtggtcagccaccccggccgcatcgccgtccactacttcaagggctggttcctcatcgacatggtggccgccatccccttcgacctgctcatcttcggctctggctctgaggagctgatcgggctgctgaagactgcgcggctgctgcggctggtgcgcgtggcgcggaagctggatcgctactcagagtacggcgcggccgtgctgttcttgctcatgtgcacctttgcgctcatcgcgcactggctagcctgcatctggtacgccatcggcaacatggagcagccacacatggactcacgcatcggctggctgcacaacctgggcgaccagataggcaaaccctacaacagcagcggcctgggcggcccctccatcaaggacaagtatgtgacggcgctctacttcaccttcagcagcctcaccagtgtgggcttcggcaacgtctctcccaacaccaactcagagaagatcttctccatctgcgtcatgctcattggctccctcatgtatgctagcatcttcggcaacgtgtcggccatcatccagcggctgtactcgggcacagcccgctaccacacacagatgctgcgggtgcgggagttcatccgcttccaccagatccccaatcccctgcgccagcgcctcgaggagtacttccagcacgcctggtcctacaccaacggcatcgacatgaacgcggtgctgaagggcttccctgagtgcctgcaggctgacatctgcctgcacctgaaccgctcactgctgcagcactgcaaacccttccgaggggccaccaagggctgccttcgggccctggccatgaagttcaagaccacacatgcaccgccaggggacacactggtgcatgctggggacctgctcaccgccctgtacttcatctcccggggctccatcgagatcctgcggggcgacgtcgtcgtggccatcctggggaagaatgacatctttggggagcctctgaacctgtatgcaaggcctggcaagtcgaacggggatgtgcgggccctcacctactgtgacctacacaagatccatcgggacgacctgctggaggtgctggacatgtaccctgagttctccgaccacttctggtccagcctggagatcaccttcaacctgcgagataccaacatgatcccgggctcccccggcagtacggagttagagggtggcttcagtcggcaacgcaagcgcaagttgtccttccgcaggcgcacggacaaggacacggagcagccaggggaggtgtcggccttggggccgggccgggcgggggcagggccgagtagccggggccggccgggggggccgtggggggagagcccgtccagtggcccctccagccctgagagcagtgaggatgagggcccaggccgcagctccagccccctccgcctggtgcccttctccagccccaggccccccggagagccgccgggtggggagcccctgatggaggactgcgagaagagcagcgacacttgcaaccccctgtcaggcgccttctcaggagtgtccaacattttcagcttctggggggacagtcggggccgccagtaccaggagctccctcgatgccccgcccccacccccagcctcctcaacatccccctctccagcccgggtcggcggccccggggcgacgtggagagcaggctggatgccctccagcgccagctcaacaggctggagacccggctgagtgcagacatggccactgtcctgcagctgctacagaggcagatgacgctggtcccgcccgcctacagtgctgtgaccaccccggggcctggccccacttccacatccccgctgttgcccgtcagccccctccccaccctcaccttggactcgctttctcaggtttcccagttcatggcgtgtgaggagctgcccccgggggccccagagcttccccaagaaggccccacacgacgcctctccctaccgggccagctgggggccctcacctcccagcccctgcacagacacggctcggacccgggcagttagtggggctgcccagtgtggacacgtggctcacccagggatcaaggcgctgctgggccgctccccttggaggccctgctcaggaggccctgaccgtggaaggggagaggaactcgaaagcacagctcctcccccagcccttgggaccatcttctcctgcagtcccctgggccccagtgagaggggcaggggcagggccggcagtaggtggggcctgtggtccccccactgccctgagggcattagctggtctaactgcccggaggcacccggccctgggccttaggcacctcaaggacttttctgctatttactgctcttattgttaaggataataattaaggatcatatgaataattaatgaagatgctgatgactatgaataataaataattatcctgaggaga

SEQ ID NO: 914 - DNA, 3884 bp, Homo sapiens
  source 1..3884: mol_type = genomic DNA
  misc_feature 1..3884: note = cDNA of KCNH2 gene SNP c.526C>T (p.Arg176Trp)
atgccggtgcggaggggccacgtcgcgccgcagaacaccttcctggacaccatcatccgcaagtttgagggccagagccgtaagttcatcatcgccaacgctcgggtggagaactgcgccgtcatctactgcaacgacggcttctgcgagctgtgcggctactcgcgggccgaggtgatgcagcgaccctgcacctgcgacttcctgcacgggccgcgcacgcagcgccgcgctgccgcgcagatcgcgcaggcactgctgggcgccgaggagcgcaaagtggaaatcgccttctaccggaaagatgggagctgcttcctatgtctggtggatgtggtgcccgtgaagaacgaggatggggctgtcatcatgttcatcctcaatttcgaggtggtgatggagaaggacatggtggggtccccggctcatgacaccaaccaccggggcccccccaccagctggctggccccaggccgcgccaagaccttccgcctgaagctgcccgcgctgctggcgctgacggcctgggagtcgtcggtgcggtcgggcggcgcgggcggcgcgggcgccccgggggccgtggtggtggacgtggacctgacgcccgcggcacccagcagcgagtcgctggccctggacgaagtgacagccatggacaaccacgtggcagggctcgggcccgcggaggagcggcgtgcgctggtgggtcccggctctccgccccgcagcgcgcccggccagctcccatcgccccgggcgcacagcctcaaccccgacgcctcgggctccagctgcagcctggcccggacgcgctcccgagaaagctgcgccagcgtgcgccgcgcctcgtcggccgacgacatcgaggccatgcgcgccggggtgctgcccccgccaccgcgccacgccagcaccggggccatgcacccactgcgcagcggcttgctcaactccacctcggactccgacctcgtgcgctaccgcaccattagcaagattccccaaatcaccctcaactttgtggacctcaagggcgaccccttcttggcttcgcccaccagtgaccgtgagatcatagcacctaagataaaggagcgaacccacaatgtcactgagaaggtcacccaggtcctgtccctgggcgccgacgtgctgcctgagtacaagctgcaggcaccgcgcatccaccgctggaccatcctgcattacagccccttcaaggccgtgtgggactggctcatcctgctgctggtcatctacacggctgtcttcacaccctactcggctgccttcctgctgaaggagacggaagaaggcccgcctgctaccgagtgtggctacgcctgccagccgctggctgtggtggacctcatcgtggacatcatgttcattgtggacatcctcatcaacttccgcaccacctacgtcaatgccaacgaggaggtggtcagccaccccggccgcatcgccgtccactacttcaagggctggttcctcatcgacatggtggccgccatccccttcgacctgctcatcttcggctctggctctgaggagctgatcgggctgctgaagactgcgcggctgctgcggctggtgcgcgtggcgcggaagctggatcgctactcagagtacggcgcggccgtgctgttcttgctcatgtgcacctttgcgctcatcgcgcactggctagcctgcatctggtacgccatcggcaacatggagcagccacacatggactcacgcatcggctggctgcacaacctgggcgaccagataggcaaaccctacaacagcagcggcctgggcggcccctccatcaaggacaagtatgtgacggcgctctacttcaccttcagcagcctcaccagtgtgggcttcggcaacgtctctcccaacaccaactcagagaagatcttctccatctgcgtcatgctcattggctccctcatgtatgctagcatcttcggcaacgtgtcggccatcatccagcggctgtactcgggcacagcccgctaccacacacagatgctgcgggtgcgggagttcatccgcttccaccagatccccaatcccctgcgccagcgcctcgaggagtacttccagcacgcctggtcctacaccaacggcatcgacatgaacgcggtgctgaagggcttccctgagtgcctgcaggctgacatctgcctgcacctgaaccgctcactgctgcagcactgcaaacccttccgaggggccaccaagggctgccttcgggccctggccatgaagttcaagaccacacatgcaccgccaggggacacactggtgcatgctggggacctgctcaccgccctgtacttcatctcccggggctccatcgagatcctgcggggcgacgtcgtcgtggccatcctggggaagaatgacatctttggggagcctctgaacctgtatgcaaggcctggcaagtcgaacggggatgtgcgggccctcacctactgtgacctacacaagatccatcgggacgacctgctggaggtgctggacatgtaccctgagttctccgaccacttctggtccagcctggagatcaccttcaacctgcgagataccaacatgatcccgggctcccccggcagtacggagttagagggtggcttcagtcggcaacgcaagcgcaagttgtccttccgcaggcgcacggacaaggacacggagcagccaggggaggtgtcggccttggggccgggccgggcgggggcagggccgagtagccggggccggccgggggggccgtggggggagagcccgtccagtggcccctccagccctgagagcagtgaggatgagggcccaggccgcagctccagccccctccgcctggtgcccttctccagccccaggccccccggagagccgccgggtggggagcccctgatggaggactgcgagaagagcagcgacacttgcaaccccctgtcaggcgccttctcaggagtgtccaacattttcagcttctggggggacagtcggggccgccagtaccaggagctccctcgatgccccgcccccacccccagcctcctcaacatccccctctccagcccgggtcggcggccccggggcgacgtggagagcaggctggatgccctccagcgccagctcaacaggctggagacccggctgagtgcagacatggccactgtcctgcagctgctacagaggcagatgacgctggtcccgcccgcctacagtgctgtgaccaccccggggcctggccccacttccacatccccgctgttgcccgtcagccccctccccaccctcaccttggactcgctttctcaggtttcccagttcatggcgtgtgaggagctgcccccgggggccccagagcttccccaagaaggccccacacgacgcctctccctaccgggccagctgggggccctcacctcccagcccctgcacagacacggctcggacccgggcagttagtggggctgcccagtgtggacacgtggctcacccagggatcaaggcgctgctgggccgctccccttggaggccctgctcaggaggccctgaccgtggaaggggagaggaactcgaaagcacagctcctcccccagcccttgggaccatcttctcctgcagtcccctgggccccagtgagaggggcaggggcagggccggcagtaggtggggcctgtggtccccccactgccctgagggcattagctggtctaactgcccggaggcacccggccctgggccttaggcacctcaaggacttttctgctatttactgctcttattgttaaggataataattaaggatcatatgaataattaatgaagatgctgatgactatgaataataaataattatcctgaggaga

SEQ ID NO: 915 - DNA, 3884 bp, Homo sapiens
  source 1..3884: mol_type = genomic DNA
  misc_feature 1..3884: note = cDNA of KCNH2 gene SNP c.527G>A (p.Arg176Gln)
atgccggtgcggaggggccacgtcgcgccgcagaacaccttcctggacaccatcatccgcaagtttgagggccagagccgtaagttcatcatcgccaacgctcgggtggagaactgcgccgtcatctactgcaacgacggcttctgcgagctgtgcggctactcgcgggccgaggtgatgcagcgaccctgcacctgcgacttcctgcacgggccgcgcacgcagcgccgcgctgccgcgcagatcgcgcaggcactgctgggcgccgaggagcgcaaagtggaaatcgccttctaccggaaagatgggagctgcttcctatgtctggtggatgtggtgcccgtgaagaacgaggatggggctgtcatcatgttcatcctcaatttcgaggtggtgatggagaaggacatggtggggtccccggctcatgacaccaaccaccggggcccccccaccagctggctggccccaggccgcgccaagaccttccgcctgaagctgcccgcgctgctggcgctgacggcccaggagtcgtcggtgcggtcgggcggcgcgggcggcgcgggcgccccgggggccgtggtggtggacgtggacctgacgcccgcggcacccagcagcgagtcgctggccctggacgaagtgacagccatggacaaccacgtggcagggctcgggcccgcggaggagcggcgtgcgctggtgggtcccggctctccgccccgcagcgcgcccggccagctcccatcgccccgggcgcacagcctcaaccccgacgcctcgggctccagctgcagcctggcccggacgcgctcccgagaaagctgcgccagcgtgcgccgcgcctcgtcggccgacgacatcgaggccatgcgcgccggggtgctgcccccgccaccgcgccacgccagcaccggggccatgcacccactgcgcagcggcttgctcaactccacctcggactccgacctcgtgcgctaccgcaccattagcaagattccccaaatcaccctcaactttgtggacctcaagggcgaccccttcttggcttcgcccaccagtgaccgtgagatcatagcacctaagataaaggagcgaacccacaatgtcactgagaaggtcacccaggtcctgtccctgggcgccgacgtgctgcctgagtacaagctgcaggcaccgcgcatccaccgctggaccatcctgcattacagccccttcaaggccgtgtgggactggctcatcctgctgctggtcatctacacggctgtcttcacaccctactcggctgccttcctgctgaaggagacggaagaaggcccgcctgctaccgagtgtggctacgcctgccagccgctggctgtggtggacctcatcgtggacatcatgttcattgtggacatcctcatcaacttccgcaccacctacgtcaatgccaacgaggaggtggtcagccaccccggccgcatcgccgtccactacttcaagggctggttcctcatcgacatggtggccgccatccccttcgacctgctcatcttcggctctggctctgaggagctgatcgggctgctgaagactgcgcggctgctgcggctggtgcgcgtggcgcggaagctggatcgctactcagagtacggcgcggccgtgctgttcttgctcatgtgcacctttgcgctcatcgcgcactggctagcctgcatctggtacgccatcggcaacatggagcagccacacatggactcacgcatcggctggctgcacaacctgggcgaccagataggcaaaccctacaacagcagcggcctgggcggcccctccatcaaggacaagtatgtgacggcgctctacttcaccttcagcagcctcaccagtgtgggcttcggcaacgtctctcccaacaccaactcagagaagatcttctccatctgcgtcatgctcattggctccctcatgtatgctagcatcttcggcaacgtgtcggccatcatccagcggctgtactcgggcacagcccgctaccacacacagatgctgcgggtgcgggagttcatccgcttccaccagatccccaatcccctgcgccagcgcctcgaggagtacttccagcacgcctggtcctacaccaacggcatcgacatgaacgcggtgctgaagggcttccctgagtgcctgcaggctgacatctgcctgcacctgaaccgctcactgctgcagcactgcaaacccttccgaggggccaccaagggctgccttcgggccctggccatgaagttcaagaccacacatgcaccgccaggggacacactggtgcatgctggggacctgctcaccgccctgtacttcatctcccggggctccatcgagatcctgcggggcgacgtcgtcgtggccatcctggggaagaatgacatctttggggagcctctgaacctgtatgcaaggcctggcaagtcgaacggggatgtgcgggccctcacctactgtgacctacacaagatccatcgggacgacctgctggaggtgctggacatgtaccctgagttctccgaccacttctggtccagcctggagatcaccttcaacctgcgagataccaacatgatcccgggctcccccggcagtacggagttagagggtggcttcagtcggcaacgcaagcgcaagttgtccttccgcaggcgcacggacaaggacacggagcagccaggggaggtgtcggccttggggccgggccgggcgggggcagggccgagtagccggggccggccgggggggccgtggggggagagcccgtccagtggcccctccagccctgagagcagtgaggatgagggcccaggccgcagctccagccccctccgcctggtgcccttctccagccccaggccccccggagagccgccgggtggggagcccctgatggaggactgcgagaagagcagcgacacttgcaaccccctgtcaggcgccttctcaggagtgtccaacattttcagcttctggggggacagtcggggccgccagtaccaggagctccctcgatgccccgcccccacccccagcctcctcaacatccccctctccagcccgggtcggcggccccggggcgacgtggagagcaggctggatgccctccagcgccagctcaacaggctggagacccggctgagtgcagacatggccactgtcctgcagctgctacagaggcagatgacgctggtcccgcccgcctacagtgctgtgaccaccccggggcctggccccacttccacatccccgctgttgcccgtcagccccctccccaccctcaccttggactcgctttctcaggtttcccagttcatggcgtgtgaggagctgcccccgggggccccagagcttccccaagaaggccccacacgacgcctctccctaccgggccagctgggggccctcacctcccagcccctgcacagacacggctcggacccgggcagttagtggggctgcccagtgtggacacgtggctcacccagggatcaaggcgctgctgggccgctccccttggaggccctgctcaggaggccctgaccgtggaaggggagaggaactcgaaagcacagctcctcccccagcccttgggaccatcttctcctgcagtcccctgggccccagtgagaggggcaggggcagggccggcagtaggtggggcctgtggtccccccactgccctgagggcattagctggtctaactgcccggaggcacccggccctgggccttaggcacctcaaggacttttctgctatttactgctcttattgttaaggataataattaaggatcatatgaataattaatgaagatgctgatgactatgaataataaataattatcctgaggaga

SEQ ID NO: 916 - DNA, 3884 bp, Homo sapiens
  source 1..3884: mol_type = genomic DNA
  misc_feature 1..3884: note = cDNA of KCNH2 gene SNP c.530A>C (p.Glu177Ala)
atgccggtgcggaggggccacgtcgcgccgcagaacaccttcctggacaccatcatccgcaagtttgagggccagagccgtaagttcatcatcgccaacgctcgggtggagaactgcgccgtcatctactgcaacgacggcttctgcgagctgtgcggctactcgcgggccgaggtgatgcagcgaccctgcacctgcgacttcctgcacgggccgcgcacgcagcgccgcgctgccgcgcagatcgcgcaggcactgctgggcgccgaggagcgcaaagtggaaatcgccttctaccggaaagatgggagctgcttcctatgtctggtggatgtggtgcccgtgaagaacgaggatggggctgtcatcatgttcatcctcaatttcgaggtggtgatggagaaggacatggtggggtccccggctcatgacaccaaccaccggggcccccccaccagctggctggccccaggccgcgccaagaccttccgcctgaagctgcccgcgctgctggcgctgacggcccgggcgtcgtcggtgcggtcgggcggcgcgggcggcgcgggcgccccgggggccgtggtggtggacgtggacctgacgcccgcggcacccagcagcgagtcgctggccctggacgaagtgacagccatggacaaccacgtggcagggctcgggcccgcggaggagcggcgtgcgctggtgggtcccggctctccgccccgcagcgcgcccggccagctcccatcgccccgggcgcacagcctcaaccccgacgcctcgggctccagctgcagcctggcccggacgcgctcccgagaaagctgcgccagcgtgcgccgcgcctcgtcggccgacgacatcgaggccatgcgcgccggggtgctgcccccgccaccgcgccacgccagcaccggggccatgcacccactgcgcagcggcttgctcaactccacctcggactccgacctcgtgcgctaccgcaccattagcaagattccccaaatcaccctcaactttgtggacctcaagggcgaccccttcttggcttcgcccaccagtgaccgtgagatcatagcacctaagataaaggagcgaacccacaatgtcactgagaaggtcacccaggtcctgtccctgggcgccgacgtgctgcctgagtacaagctgcaggcaccgcgcatccaccgctggaccatcctgcattacagccccttcaaggccgtgtgggactggctcatcctgctgctggtcatctacacggctgtcttcacaccctactcggctgccttcctgctgaaggagacggaagaaggcccgcctgctaccgagtgtggctacgcctgccagccgctggctgtggtggacctcatcgtggacatcatgttcattgtggacatcctcatcaacttccgcaccacctacgtcaatgccaacgaggaggtggtcagccaccccggccgcatcgccgtccactacttcaagggctggttcctcatcgacatggtggccgccatccccttcgacctgctcatcttcggctctggctctgaggagctgatcgggctgctgaagactgcgcggctgctgcggctggtgcgcgtggcgcggaagctggatcgctactcagagtacggcgcggccgtgctgttcttgctcatgtgcacctttgcgctcatcgcgcactggctagcctgcatctggtacgccatcggcaacatggagcagccacacatggactcacgcatcggctggctgcacaacctgggcgaccagataggcaaaccctacaacagcagcggcctgggcggcccctccatcaaggacaagtatgtgacggcgctctacttcaccttcagcagcctcaccagtgtgggcttcggcaacgtctctcccaacaccaactcagagaagatcttctccatctgcgtcatgctcattggctccctcatgtatgctagcatcttcggcaacgtgtcggccatcatccagcggctgtactcgggcacagcccgctaccacacacagatgctgcgggtgcgggagttcatccgcttccaccagatccccaatcccctgcgccagcgcctcgaggagtacttccagcacgcctggtcctacaccaacggcatcgacatgaacgcggtgctgaagggcttccctgagtgcctgcaggctgacatctgcctgcacctgaaccgctcactgctgcagcactgcaaacccttccgaggggccaccaagggctgccttcgggccctggccatgaagttcaagaccacacatgcaccgccaggggacacactggtgcatgctggggacctgctcaccgccctgtacttcatctcccggggctccatcgagatcctgcggggcgacgtcgtcgtggccatcctggggaagaatgacatctttggggagcctctgaacctgtatgcaaggcctggcaagtcgaacggggatgtgcgggccctcacctactgtgacctacacaagatccatcgggacgacctgctggaggtgctggacatgtaccctgagttctccgaccacttctggtccagcctggagatcaccttcaacctgcgagataccaacatgatcccgggctcccccggcagtacggagttagagggtggcttcagtcggcaacgcaagcgcaagttgtccttccgcaggcgcacggacaaggacacggagcagccaggggaggtgtcggccttggggccgggccgggcgggggcagggccgagtagccggggccggccgggggggccgtggggggagagcccgtccagtggcccctccagccctgagagcagtgaggatgagggcccaggccgcagctccagccccctccgcctggtgcccttctccagccccaggccccccggagagccgccgggtggggagcccctgatggaggactgcgagaagagcagcgacacttgcaaccccctgtcaggcgccttctcaggagtgtccaacattttcagcttctggggggacagtcggggccgccagtaccaggagctccctcgatgccccgcccccacccccagcctcctcaacatccccctctccagcccgggtcggcggccccggggcgacgtggagagcaggctggatgccctccagcgccagctcaacaggctggagacccggctgagtgcagacatggccactgtcctgcagctgctacagaggcagatgacgctggtcccgcccgcctacagtgctgtgaccaccccggggcctggccccacttccacatccccgctgttgcccgtcagccccctccccaccctcaccttggactcgctttctcaggtttcccagttcatggcgtgtgaggagctgcccccgggggccccagagcttccccaagaaggccccacacgacgcctctccctaccgggccagctgggggccctcacctcccagcccctgcacagacacggctcggacccgggcagttagtggggctgcccagtgtggacacgtggctcacccagggatcaaggcgctgctgggccgctccccttggaggccctgctcaggaggccctgaccgtggaaggggagaggaactcgaaagcacagctcctcccccagcccttgggaccatcttctcctgcagtcccctgggccccagtgagaggggcaggggcagggccggcagtaggtggggcctgtggtccccccactgccctgagggcattagctggtctaactgcccggaggcacccggccctgggccttaggcacctcaaggacttttctgctatttactgctcttattgttaaggataataattaaggatcatatgaataattaatgaagatgctgatgactatgaataataaataattatcctgaggaga

SEQ ID NO: 917 - DNA, 3884 bp, Homo sapiens
  source 1..3884: mol_type = genomic DNA
  misc_feature 1..3884: note = cDNA of KCNH2 gene SNP c.535T>G (p.Ser179Ala)
atgccggtgcggaggggccacgtcgcgccgcagaacaccttcctggacaccatcatccgcaagtttgagggccagagccgtaagttcatcatcgccaacgctcgggtggagaactgcgccgtcatctactgcaacgacggcttctgcgagctgtgcggctactcgcgggccgaggtgatgcagcgaccctgcacctgcgacttcctgcacgggccgcgcacgcagcgccgcgctgccgcgcagatcgcgcaggcactgctgggcgccgaggagcgcaaagtggaaatcgccttctaccggaaagatgggagctgcttcctatgtctggtggatgtggtgcccgtgaagaacgaggatggggctgtcatcatgttcatcctcaatttcgaggtggtgatggagaaggacatggtggggtccccggctcatgacaccaaccaccggggcccccccaccagctggctggccccaggccgcgccaagaccttccgcctgaagctgcccgcgctgctggcgctgacggcccgggagtcggcggtgcggtcgggcggcgcgggcggcgcgggcgccccgggggccgtggtggtggacgtggacctgacgcccgcggcacccagcagcgagtcgctggccctggacgaagtgacagccatggacaaccacgtggcagggctcgggcccgcggaggagcggcgtgcgctggtgggtcccggctctccgccccgcagcgcgcccggccagctcccatcgccccgggcgcacagcctcaaccccgacgcctcgggctccagctgcagcctggcccggacgcgctcccgagaaagctgcgccagcgtgcgccgcgcctcgtcggccgacgacatcgaggccatgcgcgccggggtgctgcccccgccaccgcgccacgccagcaccggggccatgcacccactgcgcagcggcttgctcaactccacctcggactccgacctcgtgcgctaccgcaccattagcaagattccccaaatcaccctcaactttgtggacctcaagggcgaccccttcttggcttcgcccaccagtgaccgtgagatcatagcacctaagataaaggagcgaacccacaatgtcactgagaaggtcacccaggtcctgtccctgggcgccgacgtgctgcctgagtacaagctgcaggcaccgcgcatccaccgctggaccatcctgcattacagccccttcaaggccgtgtgggactggctcatcctgctgctggtcatctacacggctgtcttcacaccctactcggctgccttcctgctgaaggagacggaagaaggcccgcctgctaccgagtgtggctacgcctgccagccgctggctgtggtggacctcatcgtggacatcatgttcattgtggacatcctcatcaacttccgcaccacctacgtcaatgccaacgaggaggtggtcagccaccccggccgcatcgccgtccactacttcaagggctggttcctcatcgacatggtggccgccatccccttcgacctgctcatcttcggctctggctctgaggagctgatcgggctgctgaagactgcgcggctgctgcggctggtgcgcgtggcgcggaagctggatcgctactcagagtacggcgcggccgtgctgttcttgctcatgtgcacctttgcgctcatcgcgcactggctagcctgcatctggtacgccatcggcaacatggagcagccacacatggactcacgcatcggctggctgcacaacctgggcgaccagataggcaaaccctacaacagcagcggcctgggcggcccctccatcaaggacaagtatgtgacggcgctctacttcaccttcagcagcctcaccagtgtgggcttcggcaacgtctctcccaacaccaactcagagaagatcttctccatctgcgtcatgctcattggctccctcatgtatgctagcatcttcggcaacgtgtcggccatcatccagcggctgtactcgggcacagcccgctaccacacacagatgctgcgggtgcgggagttcatccgcttccaccagatccccaatcccctgcgccagcgcctcgaggagtacttccagcacgcctggtcctacaccaacggcatcgacatgaacgcggtgctgaagggcttccctgagtgcctgcaggctgacatctgcctgcacctgaaccgctcactgctgcagcactgcaaacccttccgaggggccaccaagggctgccttcgggccctggccatgaagttcaagaccacacatgcaccgccaggggacacactggtgcatgctggggacctgctcaccgccctgtacttcatctcccggggctccatcgagatcctgcggggcgacgtcgtcgtggccatcctggggaagaatgacatctttggggagcctctgaacctgtatgcaaggcctggcaagtcgaacggggatgtgcgggccctcacctactgtgacctacacaagatccatcgggacgacctgctggaggtgctggacatgtaccctgagttctccgaccacttctggtccagcctggagatcaccttcaacctgcgagataccaacatgatcccgggctcccccggcagtacggagttagagggtggcttcagtcggcaacgcaagcgcaagttgtccttccgcaggcgcacggacaaggacacggagcagccaggggaggtgtcggccttggggccgggccgggcgggggcagggccgagtagccggggccggccgggggggccgtggggggagagcccgtccagtggcccctccagccctgagagcagtgaggatgagggcccaggccgcagctccagccccctccgcctggtgcccttctccagccccaggccccccggagagccgccgggtggggagcccctgatggaggactgcgagaagagcagcgacacttgcaaccccctgtcaggcgccttctcaggagtgtccaacattttcagcttctggggggacagtcggggccgccagtaccaggagctccctcgatgccccgcccccacccccagcctcctcaacatccccctctccagcccgggtcggcggccccggggcgacgtggagagcaggctggatgccctccagcgccagctcaacaggctggagacccggctgagtgcagacatggccactgtcctgcagctgctacagaggcagatgacgctggtcccgcccgcctacagtgctgtgaccaccccggggcctggccccacttccacatccccgctgttgcccgtcagccccctccccaccctcaccttggactcgctttctcaggtttcccagttcatggcgtgtgaggagctgcccccgggggccccagagcttccccaagaaggccccacacgacgcctctccctaccgggccagctgggggccctcacctcccagcccctgcacagacacggctcggacccgggcagttagtggggctgcccagtgtggacacgtggctcacccagggatcaaggcgctgctgggccgctccccttggaggccctgctcaggaggccctgaccgtggaaggggagaggaactcgaaagcacagctcctcccccagcccttgggaccatcttctcctgcagtcccctgggccccagtgagaggggcaggggcagggccggcagtaggtggggcctgtggtccccccactgccctgagggcattagctggtctaactgcccggaggcacccggccctgggccttaggcacctcaaggacttttctgctatttactgctcttattgttaaggataataattaaggatcatatgaataattaatgaagatgctgatgactatgaataataaataattatcctgaggaga

SEQ ID NO: 918 - DNA, 3884 bp, Homo sapiens
  source 1..3884: mol_type = genomic DNA
  misc_feature 1..3884: note = cDNA of KCNH2 gene SNP c.542G>A (p.Arg181Gln)
atgccggtgcggaggggccacgtcgcgccgcagaacaccttcctggacaccatcatccgcaagtttgagggccagagccgtaagttcatcatcgccaacgctcgggtggagaactgcgccgtcatctactgcaacgacggcttctgcgagctgtgcggctactcgcgggccgaggtgatgcagcgaccctgcacctgcgacttcctgcacgggccgcgcacgcagcgccgcgctgccgcgcagatcgcgcaggcactgctgggcgccgaggagcgcaaagtggaaatcgccttctaccggaaagatgggagctgcttcctatgtctggtggatgtggtgcccgtgaagaacgaggatggggctgtcatcatgttcatcctcaatttcgaggtggtgatggagaaggacatggtggggtccccggctcatgacaccaaccaccggggcccccccaccagctggctggccccaggccgcgccaagaccttccgcctgaagctgcccgcgctgctggcgctgacggcccgggagtcgtcggtgcagtcgggcggcgcgggcggcgcgggcgccccgggggccgtggtggtggacgtggacctgacgcccgcggcacccagcagcgagtcgctggccctggacgaagtgacagccatggacaaccacgtggcagggctcgggcccgcggaggagcggcgtgcgctggtgggtcccggctctccgccccgcagcgcgcccggccagctcccatcgccccgggcgcacagcctcaaccccgacgcctcgggctccagctgcagcctggcccggacgcgctcccgagaaagctgcgccagcgtgcgccgcgcctcgtcggccgacgacatcgaggccatgcgcgccggggtgctgcccccgccaccgcgccacgccagcaccggggccatgcacccactgcgcagcggcttgctcaactccacctcggactccgacctcgtgcgctaccgcaccattagcaagattccccaaatcaccctcaactttgtggacctcaagggcgaccccttcttggcttcgcccaccagtgaccgtgagatcatagcacctaagataaaggagcgaacccacaatgtcactgagaaggtcacccaggtcctgtccctgggcgccgacgtgctgcctgagtacaagctgcaggcaccgcgcatccaccgctggaccatcctgcattacagccccttcaaggccgtgtgggactggctcatcctgctgctggtcatctacacggctgtcttcacaccctactcggctgccttcctgctgaaggagacggaagaaggcccgcctgctaccgagtgtggctacgcctgccagccgctggctgtggtggacctcatcgtggacatcatgttcattgtggacatcctcatcaacttccgcaccacctacgtcaatgccaacgaggaggtggtcagccaccccggccgcatcgccgtccactacttcaagggctggttcctcatcgacatggtggccgccatccccttcgacctgctcatcttcggctctggctctgaggagctgatcgggctgctgaagactgcgcggctgctgcggctggtgcgcgtggcgcggaagctggatcgctactcagagtacggcgcggccgtgctgttcttgctcatgtgcacctttgcgctcatcgcgcactggctagcctgcatctggtacgccatcggcaacatggagcagccacacatggactcacgcatcggctggctgcacaacctgggcgaccagataggcaaaccctacaacagcagcggcctgggcggcccctccatcaaggacaagtatgtgacggcgctctacttcaccttcagcagcctcaccagtgtgggcttcggcaacgtctctcccaacaccaactcagagaagatcttctccatctgcgtcatgctcattggctccctcatgtatgctagcatcttcggcaacgtgtcggccatcatccagcggctgtactcgggcacagcccgctaccacacacagatgctgcgggtgcgggagttcatccgcttccaccagatccccaatcccctgcgccagcgcctcgaggagtacttccagcacgcctggtcctacaccaacggcatcgacatgaacgcggtgctgaagggcttccctgagtgcctgcaggctgacatctgcctgcacctgaaccgctcactgctgcagcactgcaaacccttccgaggggccaccaagggctgccttcgggccctggccatgaagttcaagaccacacatgcaccgccaggggacacactggtgcatgctggggacctgctcaccgccctgtacttcatctcccggggctccatcgagatcctgcggggcgacgtcgtcgtggccatcctggggaagaatgacatctttggggagcctctgaacctgtatgcaaggcctggcaagtcgaacggggatgtgcgggccctcacctactgtgacctacacaagatccatcgggacgacctgctggaggtgctggacatgtaccctgagttctccgaccacttctggtccagcctggagatcaccttcaacctgcgagataccaacatgatcccgggctcccccggcagtacggagttagagggtggcttcagtcggcaacgcaagcgcaagttgtccttccgcaggcgcacggacaaggacacggagcagccaggggaggtgtcggccttggggccgggccgggcgggggcagggccgagtagccggggccggccgggggggccgtggggggagagcccgtccagtggcccctccagccctgagagcagtgaggatgagggcccaggccgcagctccagccccctccgcctggtgcccttctccagccccaggccccccggagagccgccgggtggggagcccctgatggaggactgcgagaagagcagcgacacttgcaaccccctgtcaggcgccttctcaggagtgtccaacattttcagcttctggggggacagtcggggccgccagtaccaggagctccctcgatgccccgcccccacccccagcctcctcaacatccccctctccagcccgggtcggcggccccggggcgacgtggagagcaggctggatgccctccagcgccagctcaacaggctggagacccggctgagtgcagacatggccactgtcctgcagctgctacagaggcagatgacgctggtcccgcccgcctacagtgctgtgaccaccccggggcctggccccacttccacatccccgctgttgcccgtcagccccctccccaccctcaccttggactcgctttctcaggtttcccagttcatggcgtgtgaggagctgcccccgggggccccagagcttccccaagaaggccccacacgacgcctctccctaccgggccagctgggggccctcacctcccagcccctgcacagacacggctcggacccgggcagttagtggggctgcccagtgtggacacgtggctcacccagggatcaaggcgctgctgggccgctccccttggaggccctgctcaggaggccctgaccgtggaaggggagaggaactcgaaagcacagctcctcccccagcccttgggaccatcttctcctgcagtcccctgggccccagtgagaggggcaggggcagggccggcagtaggtggggcctgtggtccccccactgccctgagggcattagctggtctaactgcccggaggcacccggccctgggccttaggcacctcaaggacttttctgctatttactgctcttattgttaaggataataattaaggatcatatgaataattaatgaagatgctgatgactatgaataataaataattatcctgaggaga

SEQ ID NO: 919 - DNA, 3884 bp, Homo sapiens
  source 1..3884: mol_type = genomic DNA
  misc_feature 1..3884: note = cDNA of KCNH2 gene SNP c.545C>A (p.Ser182Ter)
atgccggtgcggaggggccacgtcgcgccgcagaacaccttcctggacaccatcatccgcaagtttgagggccagagccgtaagttcatcatcgccaacgctcgggtggagaactgcgccgtcatctactgcaacgacggcttctgcgagctgtgcggctactcgcgggccgaggtgatgcagcgaccctgcacctgcgacttcctgcacgggccgcgcacgcagcgccgcgctgccgcgcagatcgcgcaggcactgctgggcgccgaggagcgcaaagtggaaatcgccttctaccggaaagatgggagctgcttcctatgtctggtggatgtggtgcccgtgaagaacgaggatggggctgtcatcatgttcatcctcaatttcgaggtggtgatggagaaggacatggtggggtccccggctcatgacaccaaccaccggggcccccccaccagctggctggccccaggccgcgccaagaccttccgcctgaagctgcccgcgctgctggcgctgacggcccgggagtcgtcggtgcggtagggcggcgcgggcggcgcgggcgccccgggggccgtggtggtggacgtggacctgacgcccgcggcacccagcagcgagtcgctggccctggacgaagtgacagccatggacaaccacgtggcagggctcgggcccgcggaggagcggcgtgcgctggtgggtcccggctctccgccccgcagcgcgcccggccagctcccatcgccccgggcgcacagcctcaaccccgacgcctcgggctccagctgcagcctggcccggacgcgctcccgagaaagctgcgccagcgtgcgccgcgcctcgtcggccgacgacatcgaggccatgcgcgccggggtgctgcccccgccaccgcgccacgccagcaccggggccatgcacccactgcgcagcggcttgctcaactccacctcggactccgacctcgtgcgctaccgcaccattagcaagattccccaaatcaccctcaactttgtggacctcaagggcgaccccttcttggcttcgcccaccagtgaccgtgagatcatagcacctaagataaaggagcgaacccacaatgtcactgagaaggtcacccaggtcctgtccctgggcgccgacgtgctgcctgagtacaagctgcaggcaccgcgcatccaccgctggaccatcctgcattacagccccttcaaggccgtgtgggactggctcatcctgctgctggtcatctacacggctgtcttcacaccctactcggctgccttcctgctgaaggagacggaagaaggcccgcctgctaccgagtgtggctacgcctgccagccgctggctgtggtggacctcatcgtggacatcatgttcattgtggacatcctcatcaacttccgcaccacctacgtcaatgccaacgaggaggtggtcagccaccccggccgcatcgccgtccactacttcaagggctggttcctcatcgacatggtggccgccatccccttcgacctgctcatcttcggctctggctctgaggagctgatcgggctgctgaagactgcgcggctgctgcggctggtgcgcgtggcgcggaagctggatcgctactcagagtacggcgcggccgtgctgttcttgctcatgtgcacctttgcgctcatcgcgcactggctagcctgcatctggtacgccatcggcaacatggagcagccacacatggactcacgcatcggctggctgcacaacctgggcgaccagataggcaaaccctacaacagcagcggcctgggcggcccctccatcaaggacaagtatgtgacggcgctctacttcaccttcagcagcctcaccagtgtgggcttcggcaacgtctctcccaacaccaactcagagaagatcttctccatctgcgtcatgctcattggctccctcatgtatgctagcatcttcggcaacgtgtcggccatcatccagcggctgtactcgggcacagcccgctaccacacacagatgctgcgggtgcgggagttcatccgcttccaccagatccccaatcccctgcgccagcgcctcgaggagtacttccagcacgcctggtcctacaccaacggcatcgacatgaacgcggtgctgaagggcttccctgagtgcctgcaggctgacatctgcctgcacctgaaccgctcactgctgcagcactgcaaacccttccgaggggccaccaagggctgccttcgggccctggccatgaagttcaagaccacacatgcaccgccaggggacacactggtgcatgctggggacctgctcaccgccctgtacttcatctcccggggctccatcgagatcctgcggggcgacgtcgtcgtggccatcctggggaagaatgacatctttggggagcctctgaacctgtatgcaaggcctggcaagtcgaacggggatgtgcgggccctcacctactgtgacctacacaagatccatcgggacgacctgctggaggtgctggacatgtaccctgagttctccgaccacttctggtccagcctggagatcaccttcaacctgcgagataccaacatgatcccgggctcccccggcagtacggagttagagggtggcttcagtcggcaacgcaagcgcaagttgtccttccgcaggcgcacggacaaggacacggagcagccaggggaggtgtcggccttggggccgggccgggcgggggcagggccgagtagccggggccggccgggggggccgtggggggagagcccgtccagtggcccctccagccctgagagcagtgaggatgagggcccaggccgcagctccagccccctccgcctggtgcccttctccagccccaggccccccggagagccgccgggtggggagcccctgatggaggactgcgagaagagcagcgacacttgcaaccccctgtcaggcgccttctcaggagtgtccaacattttcagcttctggggggacagtcggggccgccagtaccaggagctccctcgatgccccgcccccacccccagcctcctcaacatccccctctccagcccgggtcggcggccccggggcgacgtggagagcaggctggatgccctccagcgccagctcaacaggctggagacccggctgagtgcagacatggccactgtcctgcagctgctacagaggcagatgacgctggtcccgcccgcctacagtgctgtgaccaccccggggcctggccccacttccacatccccgctgttgcccgtcagccccctccccaccctcaccttggactcgctttctcaggtttcccagttcatggcgtgtgaggagctgcccccgggggccccagagcttccccaagaaggccccacacgacgcctctccctaccgggccagctgggggccctcacctcccagcccctgcacagacacggctcggacccgggcagttagtggggctgcccagtgtggacacgtggctcacccagggatcaaggcgctgctgggccgctccccttggaggccctgctcaggaggccctgaccgtggaaggggagaggaactcgaaagcacagctcctcccccagcccttgggaccatcttctcctgcagtcccctgggccccagtgagaggggcaggggcagggccggcagtaggtggggcctgtggtccccccactgccctgagggcattagctggtctaactgcccggaggcacccggccctgggccttaggcacctcaaggacttttctgctatttactgctcttattgttaaggataataattaaggatcatatgaataattaatgaagatgctgatgactatgaataataaataattatcctgaggaga

SEQ ID NO: 920 - DNA, 3884 bp, Homo sapiens
  source 1..3884: mol_type = genomic DNA
  misc_feature 1..3884: note = cDNA of KCNH2 gene SNP c.545C>G (p.Ser182Trp)
atgccggtgcggaggggccacgtcgcgccgcagaacaccttcctggacaccatcatccgcaagtttgagggccagagccgtaagttcatcatcgccaacgctcgggtggagaactgcgccgtcatctactgcaacgacggcttctgcgagctgtgcggctactcgcgggccgaggtgatgcagcgaccctgcacctgcgacttcctgcacgggccgcgcacgcagcgccgcgctgccgcgcagatcgcgcaggcactgctgggcgccgaggagcgcaaagtggaaatcgccttctaccggaaagatgggagctgcttcctatgtctggtggatgtggtgcccgtgaagaacgaggatggggctgtcatcatgttcatcctcaatttcgaggtggtgatggagaaggacatggtggggtccccggctcatgacaccaaccaccggggcccccccaccagctggctggccccaggccgcgccaagaccttccgcctgaagctgcccgcgctgctggcgctgacggcccgggagtcgtcggtgcggtggggcggcgcgggcggcgcgggcgccccgggggccgtggtggtggacgtggacctgacgcccgcggcacccagcagcgagtcgctggccctggacgaagtgacagccatggacaaccacgtggcagggctcgggcccgcggaggagcggcgtgcgctggtgggtcccggctctccgccccgcagcgcgcccggccagctcccatcgccccgggcgcacagcctcaaccccgacgcctcgggctccagctgcagcctggcccggacgcgctcccgagaaagctgcgccagcgtgcgccgcgcctcgtcggccgacgacatcgaggccatgcgcgccggggtgctgcccccgccaccgcgccacgccagcaccggggccatgcacccactgcgcagcggcttgctcaactccacctcggactccgacctcgtgcgctaccgcaccattagcaagattccccaaatcaccctcaactttgtggacctcaagggcgaccccttcttggcttcgcccaccagtgaccgtgagatcatagcacctaagataaaggagcgaacccacaatgtcactgagaaggtcacccaggtcctgtccctgggcgccgacgtgctgcctgagtacaagctgcaggcaccgcgcatccaccgctggaccatcctgcattacagccccttcaaggccgtgtgggactggctcatcctgctgctggtcatctacacggctgtcttcacaccctactcggctgccttcctgctgaaggagacggaagaaggcccgcctgctaccgagtgtggctacgcctgccagccgctggctgtggtggacctcatcgtggacatcatgttcattgtggacatcctcatcaacttccgcaccacctacgtcaatgccaacgaggaggtggtcagccaccccggccgcatcgccgtccactacttcaagggctggttcctcatcgacatggtggccgccatccccttcgacctgctcatcttcggctctggctctgaggagctgatcgggctgctgaagactgcgcggctgctgcggctggtgcgcgtggcgcggaagctggatcgctactcagagtacggcgcggccgtgctgttcttgctcatgtgcacctttgcgctcatcgcgcactggctagcctgcatctggtacgccatcggcaacatggagcagccacacatggactcacgcatcggctggctgcacaacctgggcgaccagataggcaaaccctacaacagcagcggcctgggcggcccctccatcaaggacaagtatgtgacggcgctctacttcaccttcagcagcctcaccagtgtgggcttcggcaacgtctctcccaacaccaactcagagaagatcttctccatctgcgtcatgctcattggctccctcatgtatgctagcatcttcggcaacgtgtcggccatcatccagcggctgtactcgggcacagcccgctaccacacacagatgctgcgggtgcgggagttcatccgcttccaccagatccccaatcccctgcgccagcgcctcgaggagtacttccagcacgcctggtcctacaccaacggcatcgacatgaacgcggtgctgaagggcttccctgagtgcctgcaggctgacatctgcctgcacctgaaccgctcactgctgcagcactgcaaacccttccgaggggccaccaagggctgccttcgggccctggccatgaagttcaagaccacacatgcaccgccaggggacacactggtgcatgctggggacctgctcaccgccctgtacttcatctcccggggctccatcgagatcctgcggggcgacgtcgtcgtggccatcctggggaagaatgacatctttggggagcctctgaacctgtatgcaaggcctggcaagtcgaacggggatgtgcgggccctcacctactgtgacctacacaagatccatcgggacgacctgctggaggtgctggacatgtaccctgagttctccgaccacttctggtccagcctggagatcaccttcaacctgcgagataccaacatgatcccgggctcccccggcagtacggagttagagggtggcttcagtcggcaacgcaagcgcaagttgtccttccgcaggcgcacggacaaggacacggagcagccaggggaggtgtcggccttggggccgggccgggcgggggcagggccgagtagccggggccggccgggggggccgtggggggagagcccgtccagtggcccctccagccctgagagcagtgaggatgagggcccaggccgcagctccagccccctccgcctggtgcccttctccagccccaggccccccggagagccgccgggtggggagcccctgatggaggactgcgagaagagcagcgacacttgcaaccccctgtcaggcgccttctcaggagtgtccaacattttcagcttctggggggacagtcggggccgccagtaccaggagctccctcgatgccccgcccccacccccagcctcctcaacatccccctctccagcccgggtcggcggccccggggcgacgtggagagcaggctggatgccctccagcgccagctcaacaggctggagacccggctgagtgcagacatggccactgtcctgcagctgctacagaggcagatgacgctggtcccgcccgcctacagtgctgtgaccaccccggggcctggccccacttccacatccccgctgttgcccgtcagccccctccccaccctcaccttggactcgctttctcaggtttcccagttcatggcgtgtgaggagctgcccccgggggccccagagcttccccaagaaggccccacacgacgcctctccctaccgggccagctgggggccctcacctcccagcccctgcacagacacggctcggacccgggcagttagtggggctgcccagtgtggacacgtggctcacccagggatcaaggcgctgctgggccgctccccttggaggccctgctcaggaggccctgaccgtggaaggggagaggaactcgaaagcacagctcctcccccagcccttgggaccatcttctcctgcagtcccctgggccccagtgagaggggcaggggcagggccggcagtaggtggggcctgtggtccccccactgccctgagggcattagctggtctaactgcccggaggcacccggccctgggccttaggcacctcaaggacttttctgctatttactgctcttattgttaaggataataattaaggatcatatgaataattaatgaagatgctgatgactatgaataataaataattatcctgaggaga

SEQ ID NO: 921 - DNA, 3884 bp, Homo sapiens
  source 1..3884: mol_type = genomic DNA
  misc_feature 1..3884: note = cDNA of KCNH2 gene SNP c.559G>A (p.Gly187Ser)
atgccggtgcggaggggccacgtcgcgccgcagaacaccttcctggacaccatcatccgcaagtttgagggccagagccgtaagttcatcatcgccaacgctcgggtggagaactgcgccgtcatctactgcaacgacggcttctgcgagctgtgcggctactcgcgggccgaggtgatgcagcgaccctgcacctgcgacttcctgcacgggccgcgcacgcagcgccgcgctgccgcgcagatcgcgcaggcactgctgggcgccgaggagcgcaaagtggaaatcgccttctaccggaaagatgggagctgcttcctatgtctggtggatgtggtgcccgtgaagaacgaggatggggctgtcatcatgttcatcctcaatttcgaggtggtgatggagaaggacatggtggggtccccggctcatgacaccaaccaccggggcccccccaccagctggctggccccaggccgcgccaagaccttccgcctgaagctgcccgcgctgctggcgctgacggcccgggagtcgtcggtgcggtcgggcggcgcgggcagcgcgggcgccccgggggccgtggtggtggacgtggacctgacgcccgcggcacccagcagcgagtcgctggccctggacgaagtgacagccatggacaaccacgtggcagggctcgggcccgcggaggagcggcgtgcgctggtgggtcccggctctccgccccgcagcgcgcccggccagctcccatcgccccgggcgcacagcctcaaccccgacgcctcgggctccagctgcagcctggcccggacgcgctcccgagaaagctgcgccagcgtgcgccgcgcctcgtcggccgacgacatcgaggccatgcgcgccggggtgctgcccccgccaccgcgccacgccagcaccggggccatgcacccactgcgcagcggcttgctcaactccacctcggactccgacctcgtgcgctaccgcaccattagcaagattccccaaatcaccctcaactttgtggacctcaagggcgaccccttcttggcttcgcccaccagtgaccgtgagatcatagcacctaagataaaggagcgaacccacaatgtcactgagaaggtcacccaggtcctgtccctgggcgccgacgtgctgcctgagtacaagctgcaggcaccgcgcatccaccgctggaccatcctgcattacagccccttcaaggccgtgtgggactggctcatcctgctgctggtcatctacacggctgtcttcacaccctactcggctgccttcctgctgaaggagacggaagaaggcccgcctgctaccgagtgtggctacgcctgccagccgctggctgtggtggacctcatcgtggacatcatgttcattgtggacatcctcatcaacttccgcaccacctacgtcaatgccaacgaggaggtggtcagccaccccggccgcatcgccgtccactacttcaagggctggttcctcatcgacatggtggccgccatccccttcgacctgctcatcttcggctctggctctgaggagctgatcgggctgctgaagactgcgcggctgctgcggctggtgcgcgtggcgcggaagctggatcgctactcagagtacggcgcggccgtgctgttcttgctcatgtgcacctttgcgctcatcgcgcactggctagcctgcatctggtacgccatcggcaacatggagcagccacacatggactcacgcatcggctggctgcacaacctgggcgaccagataggcaaaccctacaacagcagcggcctgggcggcccctccatcaaggacaagtatgtgacggcgctctacttcaccttcagcagcctcaccagtgtgggcttcggcaacgtctctcccaacaccaactcagagaagatcttctccatctgcgtcatgctcattggctccctcatgtatgctagcatcttcggcaacgtgtcggccatcatccagcggctgtactcgggcacagcccgctaccacacacagatgctgcgggtgcgggagttcatccgcttccaccagatccccaatcccctgcgccagcgcctcgaggagtacttccagcacgcctggtcctacaccaacggcatcgacatgaacgcggtgctgaagggcttccctgagtgcctgcaggctgacatctgcctgcacctgaaccgctcactgctgcagcactgcaaacccttccgaggggccaccaagggctgccttcgggccctggccatgaagttcaagaccacacatgcaccgccaggggacacactggtgcatgctggggacctgctcaccgccctgtacttcatctcccggggctccatcgagatcctgcggggcgacgtcgtcgtggccatcctggggaagaatgacatctttggggagcctctgaacctgtatgcaaggcctggcaagtcgaacggggatgtgcgggccctcacctactgtgacctacacaagatccatcgggacgacctgctggaggtgctggacatgtaccctgagttctccgaccacttctggtccagcctggagatcaccttcaacctgcgagataccaacatgatcccgggctcccccggcagtacggagttagagggtggcttcagtcggcaacgcaagcgcaagttgtccttccgcaggcgcacggacaaggacacggagcagccaggggaggtgtcggccttggggccgggccgggcgggggcagggccgagtagccggggccggccgggggggccgtggggggagagcccgtccagtggcccctccagccctgagagcagtgaggatgagggcccaggccgcagctccagccccctccgcctggtgcccttctccagccccaggccccccggagagccgccgggtggggagcccctgatggaggactgcgagaagagcagcgacacttgcaaccccctgtcaggcgccttctcaggagtgtccaacattttcagcttctggggggacagtcggggccgccagtaccaggagctccctcgatgccccgcccccacccccagcctcctcaacatccccctctccagcccgggtcggcggccccggggcgacgtggagagcaggctggatgccctccagcgccagctcaacaggctggagacccggctgagtgcagacatggccactgtcctgcagctgctacagaggcagatgacgctggtcccgcccgcctacagtgctgtgaccaccccggggcctggccccacttccacatccccgctgttgcccgtcagccccctccccaccctcaccttggactcgctttctcaggtttcccagttcatggcgtgtgaggagctgcccccgggggccccagagcttccccaagaaggccccacacgacgcctctccctaccgggccagctgggggccctcacctcccagcccctgcacagacacggctcggacccgggcagttagtggggctgcccagtgtggacacgtggctcacccagggatcaaggcgctgctgggccgctccccttggaggccctgctcaggaggccctgaccgtggaaggggagaggaactcgaaagcacagctcctcccccagcccttgggaccatcttctcctgcagtcccctgggccccagtgagaggggcaggggcagggccggcagtaggtggggcctgtggtccccccactgccctgagggcattagctggtctaactgcccggaggcacccggccctgggccttaggcacctcaaggacttttctgctatttactgctcttattgttaaggataataattaaggatcatatgaataattaatgaagatgctgatgactatgaataataaataattatcctgaggaga

SEQ ID NO: 922 - DNA, 3884 bp, Homo sapiens
  source 1..3884: mol_type = genomic DNA
  misc_feature 1..3884: note = cDNA of KCNH2 gene SNP c.55A>T (p.Ile19Phe)
atgccggtgcggaggggccacgtcgcgccgcagaacaccttcctggacaccatcttccgcaagtttgagggccagagccgtaagttcatcatcgccaacgctcgggtggagaactgcgccgtcatctactgcaacgacggcttctgcgagctgtgcggctactcgcgggccgaggtgatgcagcgaccctgcacctgcgacttcctgcacgggccgcgcacgcagcgccgcgctgccgcgcagatcgcgcaggcactgctgggcgccgaggagcgcaaagtggaaatcgccttctaccggaaagatgggagctgcttcctatgtctggtggatgtggtgcccgtgaagaacgaggatggggctgtcatcatgttcatcctcaatttcgaggtggtgatggagaaggacatggtggggtccccggctcatgacaccaaccaccggggcccccccaccagctggctggccccaggccgcgccaagaccttccgcctgaagctgcccgcgctgctggcgctgacggcccgggagtcgtcggtgcggtcgggcggcgcgggcggcgcgggcgccccgggggccgtggtggtggacgtggacctgacgcccgcggcacccagcagcgagtcgctggccctggacgaagtgacagccatggacaaccacgtggcagggctcgggcccgcggaggagcggcgtgcgctggtgggtcccggctctccgccccgcagcgcgcccggccagctcccatcgccccgggcgcacagcctcaaccccgacgcctcgggctccagctgcagcctggcccggacgcgctcccgagaaagctgcgccagcgtgcgccgcgcctcgtcggccgacgacatcgaggccatgcgcgccggggtgctgcccccgccaccgcgccacgccagcaccggggccatgcacccactgcgcagcggcttgctcaactccacctcggactccgacctcgtgcgctaccgcaccattagcaagattccccaaatcaccctcaactttgtggacctcaagggcgaccccttcttggcttcgcccaccagtgaccgtgagatcatagcacctaagataaaggagcgaacccacaatgtcactgagaaggtcacccaggtcctgtccctgggcgccgacgtgctgcctgagtacaagctgcaggcaccgcgcatccaccgctggaccatcctgcattacagccccttcaaggccgtgtgggactggctcatcctgctgctggtcatctacacggctgtcttcacaccctactcggctgccttcctgctgaaggagacggaagaaggcccgcctgctaccgagtgtggctacgcctgccagccgctggctgtggtggacctcatcgtggacatcatgttcattgtggacatcctcatcaacttccgcaccacctacgtcaatgccaacgaggaggtggtcagccaccccggccgcatcgccgtccactacttcaagggctggttcctcatcgacatggtggccgccatccccttcgacctgctcatcttcggctctggctctgaggagctgatcgggctgctgaagactgcgcggctgctgcggctggtgcgcgtggcgcggaagctggatcgctactcagagtacggcgcggccgtgctgttcttgctcatgtgcacctttgcgctcatcgcgcactggctagcctgcatctggtacgccatcggcaacatggagcagccacacatggactcacgcatcggctggctgcacaacctgggcgaccagataggcaaaccctacaacagcagcggcctgggcggcccctccatcaaggacaagtatgtgacggcgctctacttcaccttcagcagcctcaccagtgtgggcttcggcaacgtctctcccaacaccaactcagagaagatcttctccatctgcgtcatgctcattggctccctcatgtatgctagcatcttcggcaacgtgtcggccatcatccagcggctgtactcgggcacagcccgctaccacacacagatgctgcgggtgcgggagttcatccgcttccaccagatccccaatcccctgcgccagcgcctcgaggagtacttccagcacgcctggtcctacaccaacggcatcgacatgaacgcggtgctgaagggcttccctgagtgcctgcaggctgacatctgcctgcacctgaaccgctcactgctgcagcactgcaaacccttccgaggggccaccaagggctgccttcgggccctggccatgaagttcaagaccacacatgcaccgccaggggacacactggtgcatgctggggacctgctcaccgccctgtacttcatctcccggggctccatcgagatcctgcggggcgacgtcgtcgtggccatcctggggaagaatgacatctttggggagcctctgaacctgtatgcaaggcctggcaagtcgaacggggatgtgcgggccctcacctactgtgacctacacaagatccatcgggacgacctgctggaggtgctggacatgtaccctgagttctccgaccacttctggtccagcctggagatcaccttcaacctgcgagataccaacatgatcccgggctcccccggcagtacggagttagagggtggcttcagtcggcaacgcaagcgcaagttgtccttccgcaggcgcacggacaaggacacggagcagccaggggaggtgtcggccttggggccgggccgggcgggggcagggccgagtagccggggccggccgggggggccgtggggggagagcccgtccagtggcccctccagccctgagagcagtgaggatgagggcccaggccgcagctccagccccctccgcctggtgcccttctccagccccaggccccccggagagccgccgggtggggagcccctgatggaggactgcgagaagagcagcgacacttgcaaccccctgtcaggcgccttctcaggagtgtccaacattttcagcttctggggggacagtcggggccgccagtaccaggagctccctcgatgccccgcccccacccccagcctcctcaacatccccctctccagcccgggtcggcggccccggggcgacgtggagagcaggctggatgccctccagcgccagctcaacaggctggagacccggctgagtgcagacatggccactgtcctgcagctgctacagaggcagatgacgctggtcccgcccgcctacagtgctgtgaccaccccggggcctggccccacttccacatccccgctgttgcccgtcagccccctccccaccctcaccttggactcgctttctcaggtttcccagttcatggcgtgtgaggagctgcccccgggggccccagagcttccccaagaaggccccacacgacgcctctccctaccgggccagctgggggccctcacctcccagcccctgcacagacacggctcggacccgggcagttagtggggctgcccagtgtggacacgtggctcacccagggatcaaggcgctgctgggccgctccccttggaggccctgctcaggaggccctgaccgtggaaggggagaggaactcgaaagcacagctcctcccccagcccttgggaccatcttctcctgcagtcccctgggccccagtgagaggggcaggggcagggccggcagtaggtggggcctgtggtccccccactgccctgagggcattagctggtctaactgcccggaggcacccggccctgggccttaggcacctcaaggacttttctgctatttactgctcttattgttaaggataataattaaggatcatatgaataattaatgaagatgctgatgactatgaataataaataattatcctgaggaga

SEQ ID NO: 923 - DNA, 3884 bp, Homo sapiens
  source 1..3884: mol_type = genomic DNA
  misc_feature 1..3884: note = cDNA of KCNH2 gene SNP c.562G>A (p.Ala188Thr)
atgccggtgcggaggggccacgtcgcgccgcagaacaccttcctggacaccatcatccgcaagtttgagggccagagccgtaagttcatcatcgccaacgctcgggtggagaactgcgccgtcatctactgcaacgacggcttctgcgagctgtgcggctactcgcgggccgaggtgatgcagcgaccctgcacctgcgacttcctgcacgggccgcgcacgcagcgccgcgctgccgcgcagatcgcgcaggcactgctgggcgccgaggagcgcaaagtggaaatcgccttctaccggaaagatgggagctgcttcctatgtctggtggatgtggtgcccgtgaagaacgaggatggggctgtcatcatgttcatcctcaatttcgaggtggtgatggagaaggacatggtggggtccccggctcatgacaccaaccaccggggcccccccaccagctggctggccccaggccgcgccaagaccttccgcctgaagctgcccgcgctgctggcgctgacggcccgggagtcgtcggtgcggtcgggcggcgcgggcggcacgggcgccccgggggccgtggtggtggacgtggacctgacgcccgcggcacccagcagcgagtcgctggccctggacgaagtgacagccatggacaaccacgtggcagggctcgggcccgcggaggagcggcgtgcgctggtgggtcccggctctccgccccgcagcgcgcccggccagctcccatcgccccgggcgcacagcctcaaccccgacgcctcgggctccagctgcagcctggcccggacgcgctcccgagaaagctgcgccagcgtgcgccgcgcctcgtcggccgacgacatcgaggccatgcgcgccggggtgctgcccccgccaccgcgccacgccagcaccggggccatgcacccactgcgcagcggcttgctcaactccacctcggactccgacctcgtgcgctaccgcaccattagcaagattccccaaatcaccctcaactttgtggacctcaagggcgaccccttcttggcttcgcccaccagtgaccgtgagatcatagcacctaagataaaggagcgaacccacaatgtcactgagaaggtcacccaggtcctgtccctgggcgccgacgtgctgcctgagtacaagctgcaggcaccgcgcatccaccgctggaccatcctgcattacagccccttcaaggccgtgtgggactggctcatcctgctgctggtcatctacacggctgtcttcacaccctactcggctgccttcctgctgaaggagacggaagaaggcccgcctgctaccgagtgtggctacgcctgccagccgctggctgtggtggacctcatcgtggacatcatgttcattgtggacatcctcatcaacttccgcaccacctacgtcaatgccaacgaggaggtggtcagccaccccggccgcatcgccgtccactacttcaagggctggttcctcatcgacatggtggccgccatccccttcgacctgctcatcttcggctctggctctgaggagctgatcgggctgctgaagactgcgcggctgctgcggctggtgcgcgtggcgcggaagctggatcgctactcagagtacggcgcggccgtgctgttcttgctcatgtgcacctttgcgctcatcgcgcactggctagcctgcatctggtacgccatcggcaacatggagcagccacacatggactcacgcatcggctggctgcacaacctgggcgaccagataggcaaaccctacaacagcagcggcctgggcggcccctccatcaaggacaagtatgtgacggcgctctacttcaccttcagcagcctcaccagtgtgggcttcggcaacgtctctcccaacaccaactcagagaagatcttctccatctgcgtcatgctcattggctccctcatgtatgctagcatcttcggcaacgtgtcggccatcatccagcggctgtactcgggcacagcccgctaccacacacagatgctgcgggtgcgggagttcatccgcttccaccagatccccaatcccctgcgccagcgcctcgaggagtacttccagcacgcctggtcctacaccaacggcatcgacatgaacgcggtgctgaagggcttccctgagtgcctgcaggctgacatctgcctgcacctgaaccgctcactgctgcagcactgcaaacccttccgaggggccaccaagggctgccttcgggccctggccatgaagttcaagaccacacatgcaccgccaggggacacactggtgcatgctggggacctgctcaccgccctgtacttcatctcccggggctccatcgagatcctgcggggcgacgtcgtcgtggccatcctggggaagaatgacatctttggggagcctctgaacctgtatgcaaggcctggcaagtcgaacggggatgtgcgggccctcacctactgtgacctacacaagatccatcgggacgacctgctggaggtgctggacatgtaccctgagttctccgaccacttctggtccagcctggagatcaccttcaacctgcgagataccaacatgatcccgggctcccccggcagtacggagttagagggtggcttcagtcggcaacgcaagcgcaagttgtccttccgcaggcgcacggacaaggacacggagcagccaggggaggtgtcggccttggggccgggccgggcgggggcagggccgagtagccggggccggccgggggggccgtggggggagagcccgtccagtggcccctccagccctgagagcagtgaggatgagggcccaggccgcagctccagccccctccgcctggtgcccttctccagccccaggccccccggagagccgccgggtggggagcccctgatggaggactgcgagaagagcagcgacacttgcaaccccctgtcaggcgccttctcaggagtgtccaacattttcagcttctggggggacagtcggggccgccagtaccaggagctccctcgatgccccgcccccacccccagcctcctcaacatccccctctccagcccgggtcggcggccccggggcgacgtggagagcaggctggatgccctccagcgccagctcaacaggctggagacccggctgagtgcagacatggccactgtcctgcagctgctacagaggcagatgacgctggtcccgcccgcctacagtgctgtgaccaccccggggcctggccccacttccacatccccgctgttgcccgtcagccccctccccaccctcaccttggactcgctttctcaggtttcccagttcatggcgtgtgaggagctgcccccgggggccccagagcttccccaagaaggccccacacgacgcctctccctaccgggccagctgggggccctcacctcccagcccctgcacagacacggctcggacccgggcagttagtggggctgcccagtgtggacacgtggctcacccagggatcaaggcgctgctgggccgctccccttggaggccctgctcaggaggccctgaccgtggaaggggagaggaactcgaaagcacagctcctcccccagcccttgggaccatcttctcctgcagtcccctgggccccagtgagaggggcaggggcagggccggcagtaggtggggcctgtggtccccccactgccctgagggcattagctggtctaactgcccggaggcacccggccctgggccttaggcacctcaaggacttttctgctatttactgctcttattgttaaggataataattaaggatcatatgaataattaatgaagatgctgatgactatgaataataaataattatcctgaggaga

SEQ ID NO: 924 - DNA, 3884 bp, Homo sapiens
  source 1..3884: mol_type = genomic DNA
  misc_feature 1..3884: note = cDNA of KCNH2 gene SNP c.563C>T (p.Ala188Val)
atgccggtgcggaggggccacgtcgcgccgcagaacaccttcctggacaccatcatccgcaagtttgagggccagagccgtaagttcatcatcgccaacgctcgggtggagaactgcgccgtcatctactgcaacgacggcttctgcgagctgtgcggctactcgcgggccgaggtgatgcagcgaccctgcacctgcgacttcctgcacgggccgcgcacgcagcgccgcgctgccgcgcagatcgcgcaggcactgctgggcgccgaggagcgcaaagtggaaatcgccttctaccggaaagatgggagctgcttcctatgtctggtggatgtggtgcccgtgaagaacgaggatggggctgtcatcatgttcatcctcaatttcgaggtggtgatggagaaggacatggtggggtccccggctcatgacaccaaccaccggggcccccccaccagctggctggccccaggccgcgccaagaccttccgcctgaagctgcccgcgctgctggcgctgacggcccgggagtcgtcggtgcggtcgggcggcgcgggcggcgtgggcgccccgggggccgtggtggtggacgtggacctgacgcccgcggcacccagcagcgagtcgctggccctggacgaagtgacagccatggacaaccacgtggcagggctcgggcccgcggaggagcggcgtgcgctggtgggtcccggctctccgccccgcagcgcgcccggccagctcccatcgccccgggcgcacagcctcaaccccgacgcctcgggctccagctgcagcctggcccggacgcgctcccgagaaagctgcgccagcgtgcgccgcgcctcgtcggccgacgacatcgaggccatgcgcgccggggtgctgcccccgccaccgcgccacgccagcaccggggccatgcacccactgcgcagcggcttgctcaactccacctcggactccgacctcgtgcgctaccgcaccattagcaagattccccaaatcaccctcaactttgtggacctcaagggcgaccccttcttggcttcgcccaccagtgaccgtgagatcatagcacctaagataaaggagcgaacccacaatgtcactgagaaggtcacccaggtcctgtccctgggcgccgacgtgctgcctgagtacaagctgcaggcaccgcgcatccaccgctggaccatcctgcattacagccccttcaaggccgtgtgggactggctcatcctgctgctggtcatctacacggctgtcttcacaccctactcggctgccttcctgctgaaggagacggaagaaggcccgcctgctaccgagtgtggctacgcctgccagccgctggctgtggtggacctcatcgtggacatcatgttcattgtggacatcctcatcaacttccgcaccacctacgtcaatgccaacgaggaggtggtcagccaccccggccgcatcgccgtccactacttcaagggctggttcctcatcgacatggtggccgccatccccttcgacctgctcatcttcggctctggctctgaggagctgatcgggctgctgaagactgcgcggctgctgcggctggtgcgcgtggcgcggaagctggatcgctactcagagtacggcgcggccgtgctgttcttgctcatgtgcacctttgcgctcatcgcgcactggctagcctgcatctggtacgccatcggcaacatggagcagccacacatggactcacgcatcggctggctgcacaacctgggcgaccagataggcaaaccctacaacagcagcggcctgggcggcccctccatcaaggacaagtatgtgacggcgctctacttcaccttcagcagcctcaccagtgtgggcttcggcaacgtctctcccaacaccaactcagagaagatcttctccatctgcgtcatgctcattggctccctcatgtatgctagcatcttcggcaacgtgtcggccatcatccagcggctgtactcgggcacagcccgctaccacacacagatgctgcgggtgcgggagttcatccgcttccaccagatccccaatcccctgcgccagcgcctcgaggagtacttccagcacgcctggtcctacaccaacggcatcgacatgaacgcggtgctgaagggcttccctgagtgcctgcaggctgacatctgcctgcacctgaaccgctcactgctgcagcactgcaaacccttccgaggggccaccaagggctgccttcgggccctggccatgaagttcaagaccacacatgcaccgccaggggacacactggtgcatgctggggacctgctcaccgccctgtacttcatctcccggggctccatcgagatcctgcggggcgacgtcgtcgtggccatcctggggaagaatgacatctttggggagcctctgaacctgtatgcaaggcctggcaagtcgaacggggatgtgcgggccctcacctactgtgacctacacaagatccatcgggacgacctgctggaggtgctggacatgtaccctgagttctccgaccacttctggtccagcctggagatcaccttcaacctgcgagataccaacatgatcccgggctcccccggcagtacggagttagagggtggcttcagtcggcaacgcaagcgcaagttgtccttccgcaggcgcacggacaaggacacggagcagccaggggaggtgtcggccttggggccgggccgggcgggggcagggccgagtagccggggccggccgggggggccgtggggggagagcccgtccagtggcccctccagccctgagagcagtgaggatgagggcccaggccgcagctccagccccctccgcctggtgcccttctccagccccaggccccccggagagccgccgggtggggagcccctgatggaggactgcgagaagagcagcgacacttgcaaccccctgtcaggcgccttctcaggagtgtccaacattttcagcttctggggggacagtcggggccgccagtaccaggagctccctcgatgccccgcccccacccccagcctcctcaacatccccctctccagcccgggtcggcggccccggggcgacgtggagagcaggctggatgccctccagcgccagctcaacaggctggagacccggctgagtgcagacatggccactgtcctgcagctgctacagaggcagatgacgctggtcccgcccgcctacagtgctgtgaccaccccggggcctggccccacttccacatccccgctgttgcccgtcagccccctccccaccctcaccttggactcgctttctcaggtttcccagttcatggcgtgtgaggagctgcccccgggggccccagagcttccccaagaaggccccacacgacgcctctccctaccgggccagctgggggccctcacctcccagcccctgcacagacacggctcggacccgggcagttagtggggctgcccagtgtggacacgtggctcacccagggatcaaggcgctgctgggccgctccccttggaggccctgctcaggaggccctgaccgtggaaggggagaggaactcgaaagcacagctcctcccccagcccttgggaccatcttctcctgcagtcccctgggccccagtgagaggggcaggggcagggccggcagtaggtggggcctgtggtccccccactgccctgagggcattagctggtctaactgcccggaggcacccggccctgggccttaggcacctcaaggacttttctgctatttactgctcttattgttaaggataataattaaggatcatatgaataattaatgaagatgctgatgactatgaataataaataattatcctgaggaga

SEQ ID NO: 925 - DNA, 3884 bp, Homo sapiens
  source 1..3884: mol_type = genomic DNA
  misc_feature 1..3884: note = cDNA of KCNH2 gene SNP c.566G>T (p.Gly189Val)
atgccggtgcggaggggccacgtcgcgccgcagaacaccttcctggacaccatcatccgcaagtttgagggccagagccgtaagttcatcatcgccaacgctcgggtggagaactgcgccgtcatctactgcaacgacggcttctgcgagctgtgcggctactcgcgggccgaggtgatgcagcgaccctgcacctgcgacttcctgcacgggccgcgcacgcagcgccgcgctgccgcgcagatcgcgcaggcactgctgggcgccgaggagcgcaaagtggaaatcgccttctaccggaaagatgggagctgcttcctatgtctggtggatgtggtgcccgtgaagaacgaggatggggctgtcatcatgttcatcctcaatttcgaggtggtgatggagaaggacatggtggggtccccggctcatgacaccaaccaccggggcccccccaccagctggctggccccaggccgcgccaagaccttccgcctgaagctgcccgcgctgctggcgctgacggcccgggagtcgtcggtgcggtcgggcggcgcgggcggcgcggtcgccccgggggccgtggtggtggacgtggacctgacgcccgcggcacccagcagcgagtcgctggccctggacgaagtgacagccatggacaaccacgtggcagggctcgggcccgcggaggagcggcgtgcgctggtgggtcccggctctccgccccgcagcgcgcccggccagctcccatcgccccgggcgcacagcctcaaccccgacgcctcgggctccagctgcagcctggcccggacgcgctcccgagaaagctgcgccagcgtgcgccgcgcctcgtcggccgacgacatcgaggccatgcgcgccggggtgctgcccccgccaccgcgccacgccagcaccggggccatgcacccactgcgcagcggcttgctcaactccacctcggactccgacctcgtgcgctaccgcaccattagcaagattccccaaatcaccctcaactttgtggacctcaagggcgaccccttcttggcttcgcccaccagtgaccgtgagatcatagcacctaagataaaggagcgaacccacaatgtcactgagaaggtcacccaggtcctgtccctgggcgccgacgtgctgcctgagtacaagctgcaggcaccgcgcatccaccgctggaccatcctgcattacagccccttcaaggccgtgtgggactggctcatcctgctgctggtcatctacacggctgtcttcacaccctactcggctgccttcctgctgaaggagacggaagaaggcccgcctgctaccgagtgtggctacgcctgccagccgctggctgtggtggacctcatcgtggacatcatgttcattgtggacatcctcatcaacttccgcaccacctacgtcaatgccaacgaggaggtggtcagccaccccggccgcatcgccgtccactacttcaagggctggttcctcatcgacatggtggccgccatccccttcgacctgctcatcttcggctctggctctgaggagctgatcgggctgctgaagactgcgcggctgctgcggctggtgcgcgtggcgcggaagctggatcgctactcagagtacggcgcggccgtgctgttcttgctcatgtgcacctttgcgctcatcgcgcactggctagcctgcatctggtacgccatcggcaacatggagcagccacacatggactcacgcatcggctggctgcacaacctgggcgaccagataggcaaaccctacaacagcagcggcctgggcggcccctccatcaaggacaagtatgtgacggcgctctacttcaccttcagcagcctcaccagtgtgggcttcggcaacgtctctcccaacaccaactcagagaagatcttctccatctgcgtcatgctcattggctccctcatgtatgctagcatcttcggcaacgtgtcggccatcatccagcggctgtactcgggcacagcccgctaccacacacagatgctgcgggtgcgggagttcatccgcttccaccagatccccaatcccctgcgccagcgcctcgaggagtacttccagcacgcctggtcctacaccaacggcatcgacatgaacgcggtgctgaagggcttccctgagtgcctgcaggctgacatctgcctgcacctgaaccgctcactgctgcagcactgcaaacccttccgaggggccaccaagggctgccttcgggccctggccatgaagttcaagaccacacatgcaccgccaggggacacactggtgcatgctggggacctgctcaccgccctgtacttcatctcccggggctccatcgagatcctgcggggcgacgtcgtcgtggccatcctggggaagaatgacatctttggggagcctctgaacctgtatgcaaggcctggcaagtcgaacggggatgtgcgggccctcacctactgtgacctacacaagatccatcgggacgacctgctggaggtgctggacatgtaccctgagttctccgaccacttctggtccagcctggagatcaccttcaacctgcgagataccaacatgatcccgggctcccccggcagtacggagttagagggtggcttcagtcggcaacgcaagcgcaagttgtccttccgcaggcgcacggacaaggacacggagcagccaggggaggtgtcggccttggggccgggccgggcgggggcagggccgagtagccggggccggccgggggggccgtggggggagagcccgtccagtggcccctccagccctgagagcagtgaggatgagggcccaggccgcagctccagccccctccgcctggtgcccttctccagccccaggccccccggagagccgccgggtggggagcccctgatggaggactgcgagaagagcagcgacacttgcaaccccctgtcaggcgccttctcaggagtgtccaacattttcagcttctggggggacagtcggggccgccagtaccaggagctccctcgatgccccgcccccacccccagcctcctcaacatccccctctccagcccgggtcggcggccccggggcgacgtggagagcaggctggatgccctccagcgccagctcaacaggctggagacccggctgagtgcagacatggccactgtcctgcagctgctacagaggcagatgacgctggtcccgcccgcctacagtgctgtgaccaccccggggcctggccccacttccacatccccgctgttgcccgtcagccccctccccaccctcaccttggactcgctttctcaggtttcccagttcatggcgtgtgaggagctgcccccgggggccccagagcttccccaagaaggccccacacgacgcctctccctaccgggccagctgggggccctcacctcccagcccctgcacagacacggctcggacccgggcagttagtggggctgcccagtgtggacacgtggctcacccagggatcaaggcgctgctgggccgctccccttggaggccctgctcaggaggccctgaccgtggaaggggagaggaactcgaaagcacagctcctcccccagcccttgggaccatcttctcctgcagtcccctgggccccagtgagaggggcaggggcagggccggcagtaggtggggcctgtggtccccccactgccctgagggcattagctggtctaactgcccggaggcacccggccctgggccttaggcacctcaaggacttttctgctatttactgctcttattgttaaggataataattaaggatcatatgaataattaatgaagatgctgatgactatgaataataaataattatcctgaggaga

SEQ ID NO: 926 - DNA, 3884 bp, Homo sapiens
  source 1..3884: mol_type = genomic DNA
  misc_feature 1..3884: note = cDNA of KCNH2 gene SNP c.568G>A (p.Ala190Thr)
atgccggtgcggaggggccacgtcgcgccgcagaacaccttcctggacaccatcatccgcaagtttgagggccagagccgtaagttcatcatcgccaacgctcgggtggagaactgcgccgtcatctactgcaacgacggcttctgcgagctgtgcggctactcgcgggccgaggtgatgcagcgaccctgcacctgcgacttcctgcacgggccgcgcacgcagcgccgcgctgccgcgcagatcgcgcaggcactgctgggcgccgaggagcgcaaagtggaaatcgccttctaccggaaagatgggagctgcttcctatgtctggtggatgtggtgcccgtgaagaacgaggatggggctgtcatcatgttcatcctcaatttcgaggtggtgatggagaaggacatggtggggtccccggctcatgacaccaaccaccggggcccccccaccagctggctggccccaggccgcgccaagaccttccgcctgaagctgcccgcgctgctggcgctgacggcccgggagtcgtcggtgcggtcgggcggcgcgggcggcgcgggcaccccgggggccgtggtggtggacgtggacctgacgcccgcggcacccagcagcgagtcgctggccctggacgaagtgacagccatggacaaccacgtggcagggctcgggcccgcggaggagcggcgtgcgctggtgggtcccggctctccgccccgcagcgcgcccggccagctcccatcgccccgggcgcacagcctcaaccccgacgcctcgggctccagctgcagcctggcccggacgcgctcccgagaaagctgcgccagcgtgcgccgcgcctcgtcggccgacgacatcgaggccatgcgcgccggggtgctgcccccgccaccgcgccacgccagcaccggggccatgcacccactgcgcagcggcttgctcaactccacctcggactccgacctcgtgcgctaccgcaccattagcaagattccccaaatcaccctcaactttgtggacctcaagggcgaccccttcttggcttcgcccaccagtgaccgtgagatcatagcacctaagataaaggagcgaacccacaatgtcactgagaaggtcacccaggtcctgtccctgggcgccgacgtgctgcctgagtacaagctgcaggcaccgcgcatccaccgctggaccatcctgcattacagccccttcaaggccgtgtgggactggctcatcctgctgctggtcatctacacggctgtcttcacaccctactcggctgccttcctgctgaaggagacggaagaaggcccgcctgctaccgagtgtggctacgcctgccagccgctggctgtggtggacctcatcgtggacatcatgttcattgtggacatcctcatcaacttccgcaccacctacgtcaatgccaacgaggaggtggtcagccaccccggccgcatcgccgtccactacttcaagggctggttcctcatcgacatggtggccgccatccccttcgacctgctcatcttcggctctggctctgaggagctgatcgggctgctgaagactgcgcggctgctgcggctggtgcgcgtggcgcggaagctggatcgctactcagagtacggcgcggccgtgctgttcttgctcatgtgcacctttgcgctcatcgcgcactggctagcctgcatctggtacgccatcggcaacatggagcagccacacatggactcacgcatcggctggctgcacaacctgggcgaccagataggcaaaccctacaacagcagcggcctgggcggcccctccatcaaggacaagtatgtgacggcgctctacttcaccttcagcagcctcaccagtgtgggcttcggcaacgtctctcccaacaccaactcagagaagatcttctccatctgcgtcatgctcattggctccctcatgtatgctagcatcttcggcaacgtgtcggccatcatccagcggctgtactcgggcacagcccgctaccacacacagatgctgcgggtgcgggagttcatccgcttccaccagatccccaatcccctgcgccagcgcctcgaggagtacttccagcacgcctggtcctacaccaacggcatcgacatgaacgcggtgctgaagggcttccctgagtgcctgcaggctgacatctgcctgcacctgaaccgctcactgctgcagcactgcaaacccttccgaggggccaccaagggctgccttcgggccctggccatgaagttcaagaccacacatgcaccgccaggggacacactggtgcatgctggggacctgctcaccgccctgtacttcatctcccggggctccatcgagatcctgcggggcgacgtcgtcgtggccatcctggggaagaatgacatctttggggagcctctgaacctgtatgcaaggcctggcaagtcgaacggggatgtgcgggccctcacctactgtgacctacacaagatccatcgggacgacctgctggaggtgctggacatgtaccctgagttctccgaccacttctggtccagcctggagatcaccttcaacctgcgagataccaacatgatcccgggctcccccggcagtacggagttagagggtggcttcagtcggcaacgcaagcgcaagttgtccttccgcaggcgcacggacaaggacacggagcagccaggggaggtgtcggccttggggccgggccgggcgggggcagggccgagtagccggggccggccgggggggccgtggggggagagcccgtccagtggcccctccagccctgagagcagtgaggatgagggcccaggccgcagctccagccccctccgcctggtgcccttctccagccccaggccccccggagagccgccgggtggggagcccctgatggaggactgcgagaagagcagcgacacttgcaaccccctgtcaggcgccttctcaggagtgtccaacattttcagcttctggggggacagtcggggccgccagtaccaggagctccctcgatgccccgcccccacccccagcctcctcaacatccccctctccagcccgggtcggcggccccggggcgacgtggagagcaggctggatgccctccagcgccagctcaacaggctggagacccggctgagtgcagacatggccactgtcctgcagctgctacagaggcagatgacgctggtcccgcccgcctacagtgctgtgaccaccccggggcctggccccacttccacatccccgctgttgcccgtcagccccctccccaccctcaccttggactcgctttctcaggtttcccagttcatggcgtgtgaggagctgcccccgggggccccagagcttccccaagaaggccccacacgacgcctctccctaccgggccagctgggggccctcacctcccagcccctgcacagacacggctcggacccgggcagttagtggggctgcccagtgtggacacgtggctcacccagggatcaaggcgctgctgggccgctccccttggaggccctgctcaggaggccctgaccgtggaaggggagaggaactcgaaagcacagctcctcccccagcccttgggaccatcttctcctgcagtcccctgggccccagtgagaggggcaggggcagggccggcagtaggtggggcctgtggtccccccactgccctgagggcattagctggtctaactgcccggaggcacccggccctgggccttaggcacctcaaggacttttctgctatttactgctcttattgttaaggataataattaaggatcatatgaataattaatgaagatgctgatgactatgaataataaataattatcctgaggaga

SEQ ID NO: 927 - DNA, 3884 bp, Homo sapiens
  source 1..3884: mol_type = genomic DNA
  misc_feature 1..3884: note = cDNA of KCNH2 gene SNP c.56T>G (p.Ile19Ser)
atgccggtgcggaggggccacgtcgcgccgcagaacaccttcctggacaccatcagccgcaagtttgagggccagagccgtaagttcatcatcgccaacgctcgggtggagaactgcgccgtcatctactgcaacgacggcttctgcgagctgtgcggctactcgcgggccgaggtgatgcagcgaccctgcacctgcgacttcctgcacgggccgcgcacgcagcgccgcgctgccgcgcagatcgcgcaggcactgctgggcgccgaggagcgcaaagtggaaatcgccttctaccggaaagatgggagctgcttcctatgtctggtggatgtggtgcccgtgaagaacgaggatggggctgtcatcatgttcatcctcaatttcgaggtggtgatggagaaggacatggtggggtccccggctcatgacaccaaccaccggggcccccccaccagctggctggccccaggccgcgccaagaccttccgcctgaagctgcccgcgctgctggcgctgacggcccgggagtcgtcggtgcggtcgggcggcgcgggcggcgcgggcgccccgggggccgtggtggtggacgtggacctgacgcccgcggcacccagcagcgagtcgctggccctggacgaagtgacagccatggacaaccacgtggcagggctcgggcccgcggaggagcggcgtgcgctggtgggtcccggctctccgccccgcagcgcgcccggccagctcccatcgccccgggcgcacagcctcaaccccgacgcctcgggctccagctgcagcctggcccggacgcgctcccgagaaagctgcgccagcgtgcgccgcgcctcgtcggccgacgacatcgaggccatgcgcgccggggtgctgcccccgccaccgcgccacgccagcaccggggccatgcacccactgcgcagcggcttgctcaactccacctcggactccgacctcgtgcgctaccgcaccattagcaagattccccaaatcaccctcaactttgtggacctcaagggcgaccccttcttggcttcgcccaccagtgaccgtgagatcatagcacctaagataaaggagcgaacccacaatgtcactgagaaggtcacccaggtcctgtccctgggcgccgacgtgctgcctgagtacaagctgcaggcaccgcgcatccaccgctggaccatcctgcattacagccccttcaaggccgtgtgggactggctcatcctgctgctggtcatctacacggctgtcttcacaccctactcggctgccttcctgctgaaggagacggaagaaggcccgcctgctaccgagtgtggctacgcctgccagccgctggctgtggtggacctcatcgtggacatcatgttcattgtggacatcctcatcaacttccgcaccacctacgtcaatgccaacgaggaggtggtcagccaccccggccgcatcgccgtccactacttcaagggctggttcctcatcgacatggtggccgccatccccttcgacctgctcatcttcggctctggctctgaggagctgatcgggctgctgaagactgcgcggctgctgcggctggtgcgcgtggcgcggaagctggatcgctactcagagtacggcgcggccgtgctgttcttgctcatgtgcacctttgcgctcatcgcgcactggctagcctgcatctggtacgccatcggcaacatggagcagccacacatggactcacgcatcggctggctgcacaacctgggcgaccagataggcaaaccctacaacagcagcggcctgggcggcccctccatcaaggacaagtatgtgacggcgctctacttcaccttcagcagcctcaccagtgtgggcttcggcaacgtctctcccaacaccaactcagagaagatcttctccatctgcgtcatgctcattggctccctcatgtatgctagcatcttcggcaacgtgtcggccatcatccagcggctgtactcgggcacagcccgctaccacacacagatgctgcgggtgcgggagttcatccgcttccaccagatccccaatcccctgcgccagcgcctcgaggagtacttccagcacgcctggtcctacaccaacggcatcgacatgaacgcggtgctgaagggcttccctgagtgcctgcaggctgacatctgcctgcacctgaaccgctcactgctgcagcactgcaaacccttccgaggggccaccaagggctgccttcgggccctggccatgaagttcaagaccacacatgcaccgccaggggacacactggtgcatgctggggacctgctcaccgccctgtacttcatctcccggggctccatcgagatcctgcggggcgacgtcgtcgtggccatcctggggaagaatgacatctttggggagcctctgaacctgtatgcaaggcctggcaagtcgaacggggatgtgcgggccctcacctactgtgacctacacaagatccatcgggacgacctgctggaggtgctggacatgtaccctgagttctccgaccacttctggtccagcctggagatcaccttcaacctgcgagataccaacatgatcccgggctcccccggcagtacggagttagagggtggcttcagtcggcaacgcaagcgcaagttgtccttccgcaggcgcacggacaaggacacggagcagccaggggaggtgtcggccttggggccgggccgggcgggggcagggccgagtagccggggccggccgggggggccgtggggggagagcccgtccagtggcccctccagccctgagagcagtgaggatgagggcccaggccgcagctccagccccctccgcctggtgcccttctccagccccaggccccccggagagccgccgggtggggagcccctgatggaggactgcgagaagagcagcgacacttgcaaccccctgtcaggcgccttctcaggagtgtccaacattttcagcttctggggggacagtcggggccgccagtaccaggagctccctcgatgccccgcccccacccccagcctcctcaacatccccctctccagcccgggtcggcggccccggggcgacgtggagagcaggctggatgccctccagcgccagctcaacaggctggagacccggctgagtgcagacatggccactgtcctgcagctgctacagaggcagatgacgctggtcccgcccgcctacagtgctgtgaccaccccggggcctggccccacttccacatccccgctgttgcccgtcagccccctccccaccctcaccttggactcgctttctcaggtttcccagttcatggcgtgtgaggagctgcccccgggggccccagagcttccccaagaaggccccacacgacgcctctccctaccgggccagctgggggccctcacctcccagcccctgcacagacacggctcggacccgggcagttagtggggctgcccagtgtggacacgtggctcacccagggatcaaggcgctgctgggccgctccccttggaggccctgctcaggaggccctgaccgtggaaggggagaggaactcgaaagcacagctcctcccccagcccttgggaccatcttctcctgcagtcccctgggccccagtgagaggggcaggggcagggccggcagtaggtggggcctgtggtccccccactgccctgagggcattagctggtctaactgcccggaggcacccggccctgggccttaggcacctcaaggacttttctgctatttactgctcttattgttaaggataataattaaggatcatatgaataattaatgaagatgctgatgactatgaataataaataattatcctgaggaga

SEQ ID NO: 928 - DNA, 3884 bp, Homo sapiens
  source 1..3884: mol_type = genomic DNA
  misc_feature 1..3884: note = cDNA of KCNH2 gene SNP c.572C>T (p.Pro191Leu)
atgccggtgcggaggggccacgtcgcgccgcagaacaccttcctggacaccatcatccgcaagtttgagggccagagccgtaagttcatcatcgccaacgctcgggtggagaactgcgccgtcatctactgcaacgacggcttctgcgagctgtgcggctactcgcgggccgaggtgatgcagcgaccctgcacctgcgacttcctgcacgggccgcgcacgcagcgccgcgctgccgcgcagatcgcgcaggcactgctgggcgccgaggagcgcaaagtggaaatcgccttctaccggaaagatgggagctgcttcctatgtctggtggatgtggtgcccgtgaagaacgaggatggggctgtcatcatgttcatcctcaatttcgaggtggtgatggagaaggacatggtggggtccccggctcatgacaccaaccaccggggcccccccaccagctggctggccccaggccgcgccaagaccttccgcctgaagctgcccgcgctgctggcgctgacggcccgggagtcgtcggtgcggtcgggcggcgcgggcggcgcgggcgccctgggggccgtggtggtggacgtggacctgacgcccgcggcacccagcagcgagtcgctggccctggacgaagtgacagccatggacaaccacgtggcagggctcgggcccgcggaggagcggcgtgcgctggtgggtcccggctctccgccccgcagcgcgcccggccagctcccatcgccccgggcgcacagcctcaaccccgacgcctcgggctccagctgcagcctggcccggacgcgctcccgagaaagctgcgccagcgtgcgccgcgcctcgtcggccgacgacatcgaggccatgcgcgccggggtgctgcccccgccaccgcgccacgccagcaccggggccatgcacccactgcgcagcggcttgctcaactccacctcggactccgacctcgtgcgctaccgcaccattagcaagattccccaaatcaccctcaactttgtggacctcaagggcgaccccttcttggcttcgcccaccagtgaccgtgagatcatagcacctaagataaaggagcgaacccacaatgtcactgagaaggtcacccaggtcctgtccctgggcgccgacgtgctgcctgagtacaagctgcaggcaccgcgcatccaccgctggaccatcctgcattacagccccttcaaggccgtgtgggactggctcatcctgctgctggtcatctacacggctgtcttcacaccctactcggctgccttcctgctgaaggagacggaagaaggcccgcctgctaccgagtgtggctacgcctgccagccgctggctgtggtggacctcatcgtggacatcatgttcattgtggacatcctcatcaacttccgcaccacctacgtcaatgccaacgaggaggtggtcagccaccccggccgcatcgccgtccactacttcaagggctggttcctcatcgacatggtggccgccatccccttcgacctgctcatcttcggctctggctctgaggagctgatcgggctgctgaagactgcgcggctgctgcggctggtgcgcgtggcgcggaagctggatcgctactcagagtacggcgcggccgtgctgttcttgctcatgtgcacctttgcgctcatcgcgcactggctagcctgcatctggtacgccatcggcaacatggagcagccacacatggactcacgcatcggctggctgcacaacctgggcgaccagataggcaaaccctacaacagcagcggcctgggcggcccctccatcaaggacaagtatgtgacggcgctctacttcaccttcagcagcctcaccagtgtgggcttcggcaacgtctctcccaacaccaactcagagaagatcttctccatctgcgtcatgctcattggctccctcatgtatgctagcatcttcggcaacgtgtcggccatcatccagcggctgtactcgggcacagcccgctaccacacacagatgctgcgggtgcgggagttcatccgcttccaccagatccccaatcccctgcgccagcgcctcgaggagtacttccagcacgcctggtcctacaccaacggcatcgacatgaacgcggtgctgaagggcttccctgagtgcctgcaggctgacatctgcctgcacctgaaccgctcactgctgcagcactgcaaacccttccgaggggccaccaagggctgccttcgggccctggccatgaagttcaagaccacacatgcaccgccaggggacacactggtgcatgctggggacctgctcaccgccctgtacttcatctcccggggctccatcgagatcctgcggggcgacgtcgtcgtggccatcctggggaagaatgacatctttggggagcctctgaacctgtatgcaaggcctggcaagtcgaacggggatgtgcgggccctcacctactgtgacctacacaagatccatcgggacgacctgctggaggtgctggacatgtaccctgagttctccgaccacttctggtccagcctggagatcaccttcaacctgcgagataccaacatgatcccgggctcccccggcagtacggagttagagggtggcttcagtcggcaacgcaagcgcaagttgtccttccgcaggcgcacggacaaggacacggagcagccaggggaggtgtcggccttggggccgggccgggcgggggcagggccgagtagccggggccggccgggggggccgtggggggagagcccgtccagtggcccctccagccctgagagcagtgaggatgagggcccaggccgcagctccagccccctccgcctggtgcccttctccagccccaggccccccggagagccgccgggtggggagcccctgatggaggactgcgagaagagcagcgacacttgcaaccccctgtcaggcgccttctcaggagtgtccaacattttcagcttctggggggacagtcggggccgccagtaccaggagctccctcgatgccccgcccccacccccagcctcctcaacatccccctctccagcccgggtcggcggccccggggcgacgtggagagcaggctggatgccctccagcgccagctcaacaggctggagacccggctgagtgcagacatggccactgtcctgcagctgctacagaggcagatgacgctggtcccgcccgcctacagtgctgtgaccaccccggggcctggccccacttccacatccccgctgttgcccgtcagccccctccccaccctcaccttggactcgctttctcaggtttcccagttcatggcgtgtgaggagctgcccccgggggccccagagcttccccaagaaggccccacacgacgcctctccctaccgggccagctgggggccctcacctcccagcccctgcacagacacggctcggacccgggcagttagtggggctgcccagtgtggacacgtggctcacccagggatcaaggcgctgctgggccgctccccttggaggccctgctcaggaggccctgaccgtggaaggggagaggaactcgaaagcacagctcctcccccagcccttgggaccatcttctcctgcagtcccctgggccccagtgagaggggcaggggcagggccggcagtaggtggggcctgtggtccccccactgccctgagggcattagctggtctaactgcccggaggcacccggccctgggccttaggcacctcaaggacttttctgctatttactgctcttattgttaaggataataattaaggatcatatgaataattaatgaagatgctgatgactatgaataataaataattatcctgaggaga

SEQ ID NO: 929 - DNA, 3884 bp, Homo sapiens
  source 1..3884: mol_type = genomic DNA
  misc_feature 1..3884: note = cDNA of KCNH2 gene SNP c.578C>T (p.Ala193Val)
atgccggtgcggaggggccacgtcgcgccgcagaacaccttcctggacaccatcatccgcaagtttgagggccagagccgtaagttcatcatcgccaacgctcgggtggagaactgcgccgtcatctactgcaacgacggcttctgcgagctgtgcggctactcgcgggccgaggtgatgcagcgaccctgcacctgcgacttcctgcacgggccgcgcacgcagcgccgcgctgccgcgcagatcgcgcaggcactgctgggcgccgaggagcgcaaagtggaaatcgccttctaccggaaagatgggagctgcttcctatgtctggtggatgtggtgcccgtgaagaacgaggatggggctgtcatcatgttcatcctcaatttcgaggtggtgatggagaaggacatggtggggtccccggctcatgacaccaaccaccggggcccccccaccagctggctggccccaggccgcgccaagaccttccgcctgaagctgcccgcgctgctggcgctgacggcccgggagtcgtcggtgcggtcgggcggcgcgggcggcgcgggcgccccgggggtcgtggtggtggacgtggacctgacgcccgcggcacccagcagcgagtcgctggccctggacgaagtgacagccatggacaaccacgtggcagggctcgggcccgcggaggagcggcgtgcgctggtgggtcccggctctccgccccgcagcgcgcccggccagctcccatcgccccgggcgcacagcctcaaccccgacgcctcgggctccagctgcagcctggcccggacgcgctcccgagaaagctgcgccagcgtgcgccgcgcctcgtcggccgacgacatcgaggccatgcgcgccggggtgctgcccccgccaccgcgccacgccagcaccggggccatgcacccactgcgcagcggcttgctcaactccacctcggactccgacctcgtgcgctaccgcaccattagcaagattccccaaatcaccctcaactttgtggacctcaagggcgaccccttcttggcttcgcccaccagtgaccgtgagatcatagcacctaagataaaggagcgaacccacaatgtcactgagaaggtcacccaggtcctgtccctgggcgccgacgtgctgcctgagtacaagctgcaggcaccgcgcatccaccgctggaccatcctgcattacagccccttcaaggccgtgtgggactggctcatcctgctgctggtcatctacacggctgtcttcacaccctactcggctgccttcctgctgaaggagacggaagaaggcccgcctgctaccgagtgtggctacgcctgccagccgctggctgtggtggacctcatcgtggacatcatgttcattgtggacatcctcatcaacttccgcaccacctacgtcaatgccaacgaggaggtggtcagccaccccggccgcatcgccgtccactacttcaagggctggttcctcatcgacatggtggccgccatccccttcgacctgctcatcttcggctctggctctgaggagctgatcgggctgctgaagactgcgcggctgctgcggctggtgcgcgtggcgcggaagctggatcgctactcagagtacggcgcggccgtgctgttcttgctcatgtgcacctttgcgctcatcgcgcactggctagcctgcatctggtacgccatcggcaacatggagcagccacacatggactcacgcatcggctggctgcacaacctgggcgaccagataggcaaaccctacaacagcagcggcctgggcggcccctccatcaaggacaagtatgtgacggcgctctacttcaccttcagcagcctcaccagtgtgggcttcggcaacgtctctcccaacaccaactcagagaagatcttctccatctgcgtcatgctcattggctccctcatgtatgctagcatcttcggcaacgtgtcggccatcatccagcggctgtactcgggcacagcccgctaccacacacagatgctgcgggtgcgggagttcatccgcttccaccagatccccaatcccctgcgccagcgcctcgaggagtacttccagcacgcctggtcctacaccaacggcatcgacatgaacgcggtgctgaagggcttccctgagtgcctgcaggctgacatctgcctgcacctgaaccgctcactgctgcagcactgcaaacccttccgaggggccaccaagggctgccttcgggccctggccatgaagttcaagaccacacatgcaccgccaggggacacactggtgcatgctggggacctgctcaccgccctgtacttcatctcccggggctccatcgagatcctgcggggcgacgtcgtcgtggccatcctggggaagaatgacatctttggggagcctctgaacctgtatgcaaggcctggcaagtcgaacggggatgtgcgggccctcacctactgtgacctacacaagatccatcgggacgacctgctggaggtgctggacatgtaccctgagttctccgaccacttctggtccagcctggagatcaccttcaacctgcgagataccaacatgatcccgggctcccccggcagtacggagttagagggtggcttcagtcggcaacgcaagcgcaagttgtccttccgcaggcgcacggacaaggacacggagcagccaggggaggtgtcggccttggggccgggccgggcgggggcagggccgagtagccggggccggccgggggggccgtggggggagagcccgtccagtggcccctccagccctgagagcagtgaggatgagggcccaggccgcagctccagccccctccgcctggtgcccttctccagccccaggccccccggagagccgccgggtggggagcccctgatggaggactgcgagaagagcagcgacacttgcaaccccctgtcaggcgccttctcaggagtgtccaacattttcagcttctggggggacagtcggggccgccagtaccaggagctccctcgatgccccgcccccacccccagcctcctcaacatccccctctccagcccgggtcggcggccccggggcgacgtggagagcaggctggatgccctccagcgccagctcaacaggctggagacccggctgagtgcagacatggccactgtcctgcagctgctacagaggcagatgacgctggtcccgcccgcctacagtgctgtgaccaccccggggcctggccccacttccacatccccgctgttgcccgtcagccccctccccaccctcaccttggactcgctttctcaggtttcccagttcatggcgtgtgaggagctgcccccgggggccccagagcttccccaagaaggccccacacgacgcctctccctaccgggccagctgggggccctcacctcccagcccctgcacagacacggctcggacccgggcagttagtggggctgcccagtgtggacacgtggctcacccagggatcaaggcgctgctgggccgctccccttggaggccctgctcaggaggccctgaccgtggaaggggagaggaactcgaaagcacagctcctcccccagcccttgggaccatcttctcctgcagtcccctgggccccagtgagaggggcaggggcagggccggcagtaggtggggcctgtggtccccccactgccctgagggcattagctggtctaactgcccggaggcacccggccctgggccttaggcacctcaaggacttttctgctatttactgctcttattgttaaggataataattaaggatcatatgaataattaatgaagatgctgatgactatgaataataaataattatcctgaggaga

SEQ ID NO: 930 - DNA, 3884 bp, Homo sapiens
  source 1..3884: mol_type = genomic DNA
  misc_feature 1..3884: note = cDNA of KCNH2 gene SNP c.580G>A (p.Val194Met)
atgccggtgcggaggggccacgtcgcgccgcagaacaccttcctggacaccatcatccgcaagtttgagggccagagccgtaagttcatcatcgccaacgctcgggtggagaactgcgccgtcatctactgcaacgacggcttctgcgagctgtgcggctactcgcgggccgaggtgatgcagcgaccctgcacctgcgacttcctgcacgggccgcgcacgcagcgccgcgctgccgcgcagatcgcgcaggcactgctgggcgccgaggagcgcaaagtggaaatcgccttctaccggaaagatgggagctgcttcctatgtctggtggatgtggtgcccgtgaagaacgaggatggggctgtcatcatgttcatcctcaatttcgaggtggtgatggagaaggacatggtggggtccccggctcatgacaccaaccaccggggcccccccaccagctggctggccccaggccgcgccaagaccttccgcctgaagctgcccgcgctgctggcgctgacggcccgggagtcgtcggtgcggtcgggcggcgcgggcggcgcgggcgccccgggggccatggtggtggacgtggacctgacgcccgcggcacccagcagcgagtcgctggccctggacgaagtgacagccatggacaaccacgtggcagggctcgggcccgcggaggagcggcgtgcgctggtgggtcccggctctccgccccgcagcgcgcccggccagctcccatcgccccgggcgcacagcctcaaccccgacgcctcgggctccagctgcagcctggcccggacgcgctcccgagaaagctgcgccagcgtgcgccgcgcctcgtcggccgacgacatcgaggccatgcgcgccggggtgctgcccccgccaccgcgccacgccagcaccggggccatgcacccactgcgcagcggcttgctcaactccacctcggactccgacctcgtgcgctaccgcaccattagcaagattccccaaatcaccctcaactttgtggacctcaagggcgaccccttcttggcttcgcccaccagtgaccgtgagatcatagcacctaagataaaggagcgaacccacaatgtcactgagaaggtcacccaggtcctgtccctgggcgccgacgtgctgcctgagtacaagctgcaggcaccgcgcatccaccgctggaccatcctgcattacagccccttcaaggccgtgtgggactggctcatcctgctgctggtcatctacacggctgtcttcacaccctactcggctgccttcctgctgaaggagacggaagaaggcccgcctgctaccgagtgtggctacgcctgccagccgctggctgtggtggacctcatcgtggacatcatgttcattgtggacatcctcatcaacttccgcaccacctacgtcaatgccaacgaggaggtggtcagccaccccggccgcatcgccgtccactacttcaagggctggttcctcatcgacatggtggccgccatccccttcgacctgctcatcttcggctctggctctgaggagctgatcgggctgctgaagactgcgcggctgctgcggctggtgcgcgtggcgcggaagctggatcgctactcagagtacggcgcggccgtgctgttcttgctcatgtgcacctttgcgctcatcgcgcactggctagcctgcatctggtacgccatcggcaacatggagcagccacacatggactcacgcatcggctggctgcacaacctgggcgaccagataggcaaaccctacaacagcagcggcctgggcggcccctccatcaaggacaagtatgtgacggcgctctacttcaccttcagcagcctcaccagtgtgggcttcggcaacgtctctcccaacaccaactcagagaagatcttctccatctgcgtcatgctcattggctccctcatgtatgctagcatcttcggcaacgtgtcggccatcatccagcggctgtactcgggcacagcccgctaccacacacagatgctgcgggtgcgggagttcatccgcttccaccagatccccaatcccctgcgccagcgcctcgaggagtacttccagcacgcctggtcctacaccaacggcatcgacatgaacgcggtgctgaagggcttccctgagtgcctgcaggctgacatctgcctgcacctgaaccgctcactgctgcagcactgcaaacccttccgaggggccaccaagggctgccttcgggccctggccatgaagttcaagaccacacatgcaccgccaggggacacactggtgcatgctggggacctgctcaccgccctgtacttcatctcccggggctccatcgagatcctgcggggcgacgtcgtcgtggccatcctggggaagaatgacatctttggggagcctctgaacctgtatgcaaggcctggcaagtcgaacggggatgtgcgggccctcacctactgtgacctacacaagatccatcgggacgacctgctggaggtgctggacatgtaccctgagttctccgaccacttctggtccagcctggagatcaccttcaacctgcgagataccaacatgatcccgggctcccccggcagtacggagttagagggtggcttcagtcggcaacgcaagcgcaagttgtccttccgcaggcgcacggacaaggacacggagcagccaggggaggtgtcggccttggggccgggccgggcgggggcagggccgagtagccggggccggccgggggggccgtggggggagagcccgtccagtggcccctccagccctgagagcagtgaggatgagggcccaggccgcagctccagccccctccgcctggtgcccttctccagccccaggccccccggagagccgccgggtggggagcccctgatggaggactgcgagaagagcagcgacacttgcaaccccctgtcaggcgccttctcaggagtgtccaacattttcagcttctggggggacagtcggggccgccagtaccaggagctccctcgatgccccgcccccacccccagcctcctcaacatccccctctccagcccgggtcggcggccccggggcgacgtggagagcaggctggatgccctccagcgccagctcaacaggctggagacccggctgagtgcagacatggccactgtcctgcagctgctacagaggcagatgacgctggtcccgcccgcctacagtgctgtgaccaccccggggcctggccccacttccacatccccgctgttgcccgtcagccccctccccaccctcaccttggactcgctttctcaggtttcccagttcatggcgtgtgaggagctgcccccgggggccccagagcttccccaagaaggccccacacgacgcctctccctaccgggccagctgggggccctcacctcccagcccctgcacagacacggctcggacccgggcagttagtggggctgcccagtgtggacacgtggctcacccagggatcaaggcgctgctgggccgctccccttggaggccctgctcaggaggccctgaccgtggaaggggagaggaactcgaaagcacagctcctcccccagcccttgggaccatcttctcctgcagtcccctgggccccagtgagaggggcaggggcagggccggcagtaggtggggcctgtggtccccccactgccctgagggcattagctggtctaactgcccggaggcacccggccctgggccttaggcacctcaaggacttttctgctatttactgctcttattgttaaggataataattaaggatcatatgaataattaatgaagatgctgatgactatgaataataaataattatcctgaggaga

SEQ ID NO: 931 - DNA, 3884 bp, Homo sapiens
  source 1..3884: mol_type = genomic DNA
  misc_feature 1..3884: note = cDNA of KCNH2 gene SNP c.589G>A (p.Asp197Asn)
atgccggtgcggaggggccacgtcgcgccgcagaacaccttcctggacaccatcatccgcaagtttgagggccagagccgtaagttcatcatcgccaacgctcgggtggagaactgcgccgtcatctactgcaacgacggcttctgcgagctgtgcggctactcgcgggccgaggtgatgcagcgaccctgcacctgcgacttcctgcacgggccgcgcacgcagcgccgcgctgccgcgcagatcgcgcaggcactgctgggcgccgaggagcgcaaagtggaaatcgccttctaccggaaagatgggagctgcttcctatgtctggtggatgtggtgcccgtgaagaacgaggatggggctgtcatcatgttcatcctcaatttcgaggtggtgatggagaaggacatggtggggtccccggctcatgacaccaaccaccggggcccccccaccagctggctggccccaggccgcgccaagaccttccgcctgaagctgcccgcgctgctggcgctgacggcccgggagtcgtcggtgcggtcgggcggcgcgggcggcgcgggcgccccgggggccgtggtggtgaacgtggacctgacgcccgcggcacccagcagcgagtcgctggccctggacgaagtgacagccatggacaaccacgtggcagggctcgggcccgcggaggagcggcgtgcgctggtgggtcccggctctccgccccgcagcgcgcccggccagctcccatcgccccgggcgcacagcctcaaccccgacgcctcgggctccagctgcagcctggcccggacgcgctcccgagaaagctgcgccagcgtgcgccgcgcctcgtcggccgacgacatcgaggccatgcgcgccggggtgctgcccccgccaccgcgccacgccagcaccggggccatgcacccactgcgcagcggcttgctcaactccacctcggactccgacctcgtgcgctaccgcaccattagcaagattccccaaatcaccctcaactttgtggacctcaagggcgaccccttcttggcttcgcccaccagtgaccgtgagatcatagcacctaagataaaggagcgaacccacaatgtcactgagaaggtcacccaggtcctgtccctgggcgccgacgtgctgcctgagtacaagctgcaggcaccgcgcatccaccgctggaccatcctgcattacagccccttcaaggccgtgtgggactggctcatcctgctgctggtcatctacacggctgtcttcacaccctactcggctgccttcctgctgaaggagacggaagaaggcccgcctgctaccgagtgtggctacgcctgccagccgctggctgtggtggacctcatcgtggacatcatgttcattgtggacatcctcatcaacttccgcaccacctacgtcaatgccaacgaggaggtggtcagccaccccggccgcatcgccgtccactacttcaagggctggttcctcatcgacatggtggccgccatccccttcgacctgctcatcttcggctctggctctgaggagctgatcgggctgctgaagactgcgcggctgctgcggctggtgcgcgtggcgcggaagctggatcgctactcagagtacggcgcggccgtgctgttcttgctcatgtgcacctttgcgctcatcgcgcactggctagcctgcatctggtacgccatcggcaacatggagcagccacacatggactcacgcatcggctggctgcacaacctgggcgaccagataggcaaaccctacaacagcagcggcctgggcggcccctccatcaaggacaagtatgtgacggcgctctacttcaccttcagcagcctcaccagtgtgggcttcggcaacgtctctcccaacaccaactcagagaagatcttctccatctgcgtcatgctcattggctccctcatgtatgctagcatcttcggcaacgtgtcggccatcatccagcggctgtactcgggcacagcccgctaccacacacagatgctgcgggtgcgggagttcatccgcttccaccagatccccaatcccctgcgccagcgcctcgaggagtacttccagcacgcctggtcctacaccaacggcatcgacatgaacgcggtgctgaagggcttccctgagtgcctgcaggctgacatctgcctgcacctgaaccgctcactgctgcagcactgcaaacccttccgaggggccaccaagggctgccttcgggccctggccatgaagttcaagaccacacatgcaccgccaggggacacactggtgcatgctggggacctgctcaccgccctgtacttcatctcccggggctccatcgagatcctgcggggcgacgtcgtcgtggccatcctggggaagaatgacatctttggggagcctctgaacctgtatgcaaggcctggcaagtcgaacggggatgtgcgggccctcacctactgtgacctacacaagatccatcgggacgacctgctggaggtgctggacatgtaccctgagttctccgaccacttctggtccagcctggagatcaccttcaacctgcgagataccaacatgatcccgggctcccccggcagtacggagttagagggtggcttcagtcggcaacgcaagcgcaagttgtccttccgcaggcgcacggacaaggacacggagcagccaggggaggtgtcggccttggggccgggccgggcgggggcagggccgagtagccggggccggccgggggggccgtggggggagagcccgtccagtggcccctccagccctgagagcagtgaggatgagggcccaggccgcagctccagccccctccgcctggtgcccttctccagccccaggccccccggagagccgccgggtggggagcccctgatggaggactgcgagaagagcagcgacacttgcaaccccctgtcaggcgccttctcaggagtgtccaacattttcagcttctggggggacagtcggggccgccagtaccaggagctccctcgatgccccgcccccacccccagcctcctcaacatccccctctccagcccgggtcggcggccccggggcgacgtggagagcaggctggatgccctccagcgccagctcaacaggctggagacccggctgagtgcagacatggccactgtcctgcagctgctacagaggcagatgacgctggtcccgcccgcctacagtgctgtgaccaccccggggcctggccccacttccacatccccgctgttgcccgtcagccccctccccaccctcaccttggactcgctttctcaggtttcccagttcatggcgtgtgaggagctgcccccgggggccccagagcttccccaagaaggccccacacgacgcctctccctaccgggccagctgggggccctcacctcccagcccctgcacagacacggctcggacccgggcagttagtggggctgcccagtgtggacacgtggctcacccagggatcaaggcgctgctgggccgctccccttggaggccctgctcaggaggccctgaccgtggaaggggagaggaactcgaaagcacagctcctcccccagcccttgggaccatcttctcctgcagtcccctgggccccagtgagaggggcaggggcagggccggcagtaggtggggcctgtggtccccccactgccctgagggcattagctggtctaactgcccggaggcacccggccctgggccttaggcacctcaaggacttttctgctatttactgctcttattgttaaggataataattaaggatcatatgaataattaatgaagatgctgatgactatgaataataaataattatcctgaggaga

SEQ ID NO: 932 - DNA, 3884 bp, Homo sapiens
  source 1..3884: mol_type = genomic DNA
  misc_feature 1..3884: note = cDNA of KCNH2 gene SNP c.58C>G (p.Arg20Gly)
atgccggtgcggaggggccacgtcgcgccgcagaacaccttcctggacaccatcatcggcaagtttgagggccagagccgtaagttcatcatcgccaacgctcgggtggagaactgcgccgtcatctactgcaacgacggcttctgcgagctgtgcggctactcgcgggccgaggtgatgcagcgaccctgcacctgcgacttcctgcacgggccgcgcacgcagcgccgcgctgccgcgcagatcgcgcaggcactgctgggcgccgaggagcgcaaagtggaaatcgccttctaccggaaagatgggagctgcttcctatgtctggtggatgtggtgcccgtgaagaacgaggatggggctgtcatcatgttcatcctcaatttcgaggtggtgatggagaaggacatggtggggtccccggctcatgacaccaaccaccggggcccccccaccagctggctggccccaggccgcgccaagaccttccgcctgaagctgcccgcgctgctggcgctgacggcccgggagtcgtcggtgcggtcgggcggcgcgggcggcgcgggcgccccgggggccgtggtggtggacgtggacctgacgcccgcggcacccagcagcgagtcgctggccctggacgaagtgacagccatggacaaccacgtggcagggctcgggcccgcggaggagcggcgtgcgctggtgggtcccggctctccgccccgcagcgcgcccggccagctcccatcgccccgggcgcacagcctcaaccccgacgcctcgggctccagctgcagcctggcccggacgcgctcccgagaaagctgcgccagcgtgcgccgcgcctcgtcggccgacgacatcgaggccatgcgcgccggggtgctgcccccgccaccgcgccacgccagcaccggggccatgcacccactgcgcagcggcttgctcaactccacctcggactccgacctcgtgcgctaccgcaccattagcaagattccccaaatcaccctcaactttgtggacctcaagggcgaccccttcttggcttcgcccaccagtgaccgtgagatcatagcacctaagataaaggagcgaacccacaatgtcactgagaaggtcacccaggtcctgtccctgggcgccgacgtgctgcctgagtacaagctgcaggcaccgcgcatccaccgctggaccatcctgcattacagccccttcaaggccgtgtgggactggctcatcctgctgctggtcatctacacggctgtcttcacaccctactcggctgccttcctgctgaaggagacggaagaaggcccgcctgctaccgagtgtggctacgcctgccagccgctggctgtggtggacctcatcgtggacatcatgttcattgtggacatcctcatcaacttccgcaccacctacgtcaatgccaacgaggaggtggtcagccaccccggccgcatcgccgtccactacttcaagggctggttcctcatcgacatggtggccgccatccccttcgacctgctcatcttcggctctggctctgaggagctgatcgggctgctgaagactgcgcggctgctgcggctggtgcgcgtggcgcggaagctggatcgctactcagagtacggcgcggccgtgctgttcttgctcatgtgcacctttgcgctcatcgcgcactggctagcctgcatctggtacgccatcggcaacatggagcagccacacatggactcacgcatcggctggctgcacaacctgggcgaccagataggcaaaccctacaacagcagcggcctgggcggcccctccatcaaggacaagtatgtgacggcgctctacttcaccttcagcagcctcaccagtgtgggcttcggcaacgtctctcccaacaccaactcagagaagatcttctccatctgcgtcatgctcattggctccctcatgtatgctagcatcttcggcaacgtgtcggccatcatccagcggctgtactcgggcacagcccgctaccacacacagatgctgcgggtgcgggagttcatccgcttccaccagatccccaatcccctgcgccagcgcctcgaggagtacttccagcacgcctggtcctacaccaacggcatcgacatgaacgcggtgctgaagggcttccctgagtgcctgcaggctgacatctgcctgcacctgaaccgctcactgctgcagcactgcaaacccttccgaggggccaccaagggctgccttcgggccctggccatgaagttcaagaccacacatgcaccgccaggggacacactggtgcatgctggggacctgctcaccgccctgtacttcatctcccggggctccatcgagatcctgcggggcgacgtcgtcgtggccatcctggggaagaatgacatctttggggagcctctgaacctgtatgcaaggcctggcaagtcgaacggggatgtgcgggccctcacctactgtgacctacacaagatccatcgggacgacctgctggaggtgctggacatgtaccctgagttctccgaccacttctggtccagcctggagatcaccttcaacctgcgagataccaacatgatcccgggctcccccggcagtacggagttagagggtggcttcagtcggcaacgcaagcgcaagttgtccttccgcaggcgcacggacaaggacacggagcagccaggggaggtgtcggccttggggccgggccgggcgggggcagggccgagtagccggggccggccgggggggccgtggggggagagcccgtccagtggcccctccagccctgagagcagtgaggatgagggcccaggccgcagctccagccccctccgcctggtgcccttctccagccccaggccccccggagagccgccgggtggggagcccctgatggaggactgcgagaagagcagcgacacttgcaaccccctgtcaggcgccttctcaggagtgtccaacattttcagcttctggggggacagtcggggccgccagtaccaggagctccctcgatgccccgcccccacccccagcctcctcaacatccccctctccagcccgggtcggcggccccggggcgacgtggagagcaggctggatgccctccagcgccagctcaacaggctggagacccggctgagtgcagacatggccactgtcctgcagctgctacagaggcagatgacgctggtcccgcccgcctacagtgctgtgaccaccccggggcctggccccacttccacatccccgctgttgcccgtcagccccctccccaccctcaccttggactcgctttctcaggtttcccagttcatggcgtgtgaggagctgcccccgggggccccagagcttccccaagaaggccccacacgacgcctctccctaccgggccagctgggggccctcacctcccagcccctgcacagacacggctcggacccgggcagttagtggggctgcccagtgtggacacgtggctcacccagggatcaaggcgctgctgggccgctccccttggaggccctgctcaggaggccctgaccgtggaaggggagaggaactcgaaagcacagctcctcccccagcccttgggaccatcttctcctgcagtcccctgggccccagtgagaggggcaggggcagggccggcagtaggtggggcctgtggtccccccactgccctgagggcattagctggtctaactgcccggaggcacccggccctgggccttaggcacctcaaggacttttctgctatttactgctcttattgttaaggataataattaaggatcatatgaataattaatgaagatgctgatgactatgaataataaataattatcctgaggaga

SEQ ID NO: 933 - DNA, 3884 bp, Homo sapiens
  source 1..3884: mol_type = genomic DNA
  misc_feature 1..3884: note = cDNA of KCNH2 gene SNP c.602C>T (p.Thr201Met)
atgccggtgcggaggggccacgtcgcgccgcagaacaccttcctggacaccatcatccgcaagtttgagggccagagccgtaagttcatcatcgccaacgctcgggtggagaactgcgccgtcatctactgcaacgacggcttctgcgagctgtgcggctactcgcgggccgaggtgatgcagcgaccctgcacctgcgacttcctgcacgggccgcgcacgcagcgccgcgctgccgcgcagatcgcgcaggcactgctgggcgccgaggagcgcaaagtggaaatcgccttctaccggaaagatgggagctgcttcctatgtctggtggatgtggtgcccgtgaagaacgaggatggggctgtcatcatgttcatcctcaatttcgaggtggtgatggagaaggacatggtggggtccccggctcatgacaccaaccaccggggcccccccaccagctggctggccccaggccgcgccaagaccttccgcctgaagctgcccgcgctgctggcgctgacggcccgggagtcgtcggtgcggtcgggcggcgcgggcggcgcgggcgccccgggggccgtggtggtggacgtggacctgatgcccgcggcacccagcagcgagtcgctggccctggacgaagtgacagccatggacaaccacgtggcagggctcgggcccgcggaggagcggcgtgcgctggtgggtcccggctctccgccccgcagcgcgcccggccagctcccatcgccccgggcgcacagcctcaaccccgacgcctcgggctccagctgcagcctggcccggacgcgctcccgagaaagctgcgccagcgtgcgccgcgcctcgtcggccgacgacatcgaggccatgcgcgccggggtgctgcccccgccaccgcgccacgccagcaccggggccatgcacccactgcgcagcggcttgctcaactccacctcggactccgacctcgtgcgctaccgcaccattagcaagattccccaaatcaccctcaactttgtggacctcaagggcgaccccttcttggcttcgcccaccagtgaccgtgagatcatagcacctaagataaaggagcgaacccacaatgtcactgagaaggtcacccaggtcctgtccctgggcgccgacgtgctgcctgagtacaagctgcaggcaccgcgcatccaccgctggaccatcctgcattacagccccttcaaggccgtgtgggactggctcatcctgctgctggtcatctacacggctgtcttcacaccctactcggctgccttcctgctgaaggagacggaagaaggcccgcctgctaccgagtgtggctacgcctgccagccgctggctgtggtggacctcatcgtggacatcatgttcattgtggacatcctcatcaacttccgcaccacctacgtcaatgccaacgaggaggtggtcagccaccccggccgcatcgccgtccactacttcaagggctggttcctcatcgacatggtggccgccatccccttcgacctgctcatcttcggctctggctctgaggagctgatcgggctgctgaagactgcgcggctgctgcggctggtgcgcgtggcgcggaagctggatcgctactcagagtacggcgcggccgtgctgttcttgctcatgtgcacctttgcgctcatcgcgcactggctagcctgcatctggtacgccatcggcaacatggagcagccacacatggactcacgcatcggctggctgcacaacctgggcgaccagataggcaaaccctacaacagcagcggcctgggcggcccctccatcaaggacaagtatgtgacggcgctctacttcaccttcagcagcctcaccagtgtgggcttcggcaacgtctctcccaacaccaactcagagaagatcttctccatctgcgtcatgctcattggctccctcatgtatgctagcatcttcggcaacgtgtcggccatcatccagcggctgtactcgggcacagcccgctaccacacacagatgctgcgggtgcgggagttcatccgcttccaccagatccccaatcccctgcgccagcgcctcgaggagtacttccagcacgcctggtcctacaccaacggcatcgacatgaacgcggtgctgaagggcttccctgagtgcctgcaggctgacatctgcctgcacctgaaccgctcactgctgcagcactgcaaacccttccgaggggccaccaagggctgccttcgggccctggccatgaagttcaagaccacacatgcaccgccaggggacacactggtgcatgctggggacctgctcaccgccctgtacttcatctcccggggctccatcgagatcctgcggggcgacgtcgtcgtggccatcctggggaagaatgacatctttggggagcctctgaacctgtatgcaaggcctggcaagtcgaacggggatgtgcgggccctcacctactgtgacctacacaagatccatcgggacgacctgctggaggtgctggacatgtaccctgagttctccgaccacttctggtccagcctggagatcaccttcaacctgcgagataccaacatgatcccgggctcccccggcagtacggagttagagggtggcttcagtcggcaacgcaagcgcaagttgtccttccgcaggcgcacggacaaggacacggagcagccaggggaggtgtcggccttggggccgggccgggcgggggcagggccgagtagccggggccggccgggggggccgtggggggagagcccgtccagtggcccctccagccctgagagcagtgaggatgagggcccaggccgcagctccagccccctccgcctggtgcccttctccagccccaggccccccggagagccgccgggtggggagcccctgatggaggactgcgagaagagcagcgacacttgcaaccccctgtcaggcgccttctcaggagtgtccaacattttcagcttctggggggacagtcggggccgccagtaccaggagctccctcgatgccccgcccccacccccagcctcctcaacatccccctctccagcccgggtcggcggccccggggcgacgtggagagcaggctggatgccctccagcgccagctcaacaggctggagacccggctgagtgcagacatggccactgtcctgcagctgctacagaggcagatgacgctggtcccgcccgcctacagtgctgtgaccaccccggggcctggccccacttccacatccccgctgttgcccgtcagccccctccccaccctcaccttggactcgctttctcaggtttcccagttcatggcgtgtgaggagctgcccccgggggccccagagcttccccaagaaggccccacacgacgcctctccctaccgggccagctgggggccctcacctcccagcccctgcacagacacggctcggacccgggcagttagtggggctgcccagtgtggacacgtggctcacccagggatcaaggcgctgctgggccgctccccttggaggccctgctcaggaggccctgaccgtggaaggggagaggaactcgaaagcacagctcctcccccagcccttgggaccatcttctcctgcagtcccctgggccccagtgagaggggcaggggcagggccggcagtaggtggggcctgtggtccccccactgccctgagggcattagctggtctaactgcccggaggcacccggccctgggccttaggcacctcaaggacttttctgctatttactgctcttattgttaaggataataattaaggatcatatgaataattaatgaagatgctgatgactatgaataataaataattatcctgaggaga

SEQ ID NO: 934 - DNA, 3884 bp, Homo sapiens
  source 1..3884: mol_type = genomic DNA
  misc_feature 1..3884: note = cDNA of KCNH2 gene SNP c.607G>A (p.Ala203Thr)
atgccggtgcggaggggccacgtcgcgccgcagaacaccttcctggacaccatcatccgcaagtttgagggccagagccgtaagttcatcatcgccaacgctcgggtggagaactgcgccgtcatctactgcaacgacggcttctgcgagctgtgcggctactcgcgggccgaggtgatgcagcgaccctgcacctgcgacttcctgcacgggccgcgcacgcagcgccgcgctgccgcgcagatcgcgcaggcactgctgggcgccgaggagcgcaaagtggaaatcgccttctaccggaaagatgggagctgcttcctatgtctggtggatgtggtgcccgtgaagaacgaggatggggctgtcatcatgttcatcctcaatttcgaggtggtgatggagaaggacatggtggggtccccggctcatgacaccaaccaccggggcccccccaccagctggctggccccaggccgcgccaagaccttccgcctgaagctgcccgcgctgctggcgctgacggcccgggagtcgtcggtgcggtcgggcggcgcgggcggcgcgggcgccccgggggccgtggtggtggacgtggacctgacgcccacggcacccagcagcgagtcgctggccctggacgaagtgacagccatggacaaccacgtggcagggctcgggcccgcggaggagcggcgtgcgctggtgggtcccggctctccgccccgcagcgcgcccggccagctcccatcgccccgggcgcacagcctcaaccccgacgcctcgggctccagctgcagcctggcccggacgcgctcccgagaaagctgcgccagcgtgcgccgcgcctcgtcggccgacgacatcgaggccatgcgcgccggggtgctgcccccgccaccgcgccacgccagcaccggggccatgcacccactgcgcagcggcttgctcaactccacctcggactccgacctcgtgcgctaccgcaccattagcaagattccccaaatcaccctcaactttgtggacctcaagggcgaccccttcttggcttcgcccaccagtgaccgtgagatcatagcacctaagataaaggagcgaacccacaatgtcactgagaaggtcacccaggtcctgtccctgggcgccgacgtgctgcctgagtacaagctgcaggcaccgcgcatccaccgctggaccatcctgcattacagccccttcaaggccgtgtgggactggctcatcctgctgctggtcatctacacggctgtcttcacaccctactcggctgccttcctgctgaaggagacggaagaaggcccgcctgctaccgagtgtggctacgcctgccagccgctggctgtggtggacctcatcgtggacatcatgttcattgtggacatcctcatcaacttccgcaccacctacgtcaatgccaacgaggaggtggtcagccaccccggccgcatcgccgtccactacttcaagggctggttcctcatcgacatggtggccgccatccccttcgacctgctcatcttcggctctggctctgaggagctgatcgggctgctgaagactgcgcggctgctgcggctggtgcgcgtggcgcggaagctggatcgctactcagagtacggcgcggccgtgctgttcttgctcatgtgcacctttgcgctcatcgcgcactggctagcctgcatctggtacgccatcggcaacatggagcagccacacatggactcacgcatcggctggctgcacaacctgggcgaccagataggcaaaccctacaacagcagcggcctgggcggcccctccatcaaggacaagtatgtgacggcgctctacttcaccttcagcagcctcaccagtgtgggcttcggcaacgtctctcccaacaccaactcagagaagatcttctccatctgcgtcatgctcattggctccctcatgtatgctagcatcttcggcaacgtgtcggccatcatccagcggctgtactcgggcacagcccgctaccacacacagatgctgcgggtgcgggagttcatccgcttccaccagatccccaatcccctgcgccagcgcctcgaggagtacttccagcacgcctggtcctacaccaacggcatcgacatgaacgcggtgctgaagggcttccctgagtgcctgcaggctgacatctgcctgcacctgaaccgctcactgctgcagcactgcaaacccttccgaggggccaccaagggctgccttcgggccctggccatgaagttcaagaccacacatgcaccgccaggggacacactggtgcatgctggggacctgctcaccgccctgtacttcatctcccggggctccatcgagatcctgcggggcgacgtcgtcgtggccatcctggggaagaatgacatctttggggagcctctgaacctgtatgcaaggcctggcaagtcgaacggggatgtgcgggccctcacctactgtgacctacacaagatccatcgggacgacctgctggaggtgctggacatgtaccctgagttctccgaccacttctggtccagcctggagatcaccttcaacctgcgagataccaacatgatcccgggctcccccggcagtacggagttagagggtggcttcagtcggcaacgcaagcgcaagttgtccttccgcaggcgcacggacaaggacacggagcagccaggggaggtgtcggccttggggccgggccgggcgggggcagggccgagtagccggggccggccgggggggccgtggggggagagcccgtccagtggcccctccagccctgagagcagtgaggatgagggcccaggccgcagctccagccccctccgcctggtgcccttctccagccccaggccccccggagagccgccgggtggggagcccctgatggaggactgcgagaagagcagcgacacttgcaaccccctgtcaggcgccttctcaggagtgtccaacattttcagcttctggggggacagtcggggccgccagtaccaggagctccctcgatgccccgcccccacccccagcctcctcaacatccccctctccagcccgggtcggcggccccggggcgacgtggagagcaggctggatgccctccagcgccagctcaacaggctggagacccggctgagtgcagacatggccactgtcctgcagctgctacagaggcagatgacgctggtcccgcccgcctacagtgctgtgaccaccccggggcctggccccacttccacatccccgctgttgcccgtcagccccctccccaccctcaccttggactcgctttctcaggtttcccagttcatggcgtgtgaggagctgcccccgggggccccagagcttccccaagaaggccccacacgacgcctctccctaccgggccagctgggggccctcacctcccagcccctgcacagacacggctcggacccgggcagttagtggggctgcccagtgtggacacgtggctcacccagggatcaaggcgctgctgggccgctccccttggaggccctgctcaggaggccctgaccgtggaaggggagaggaactcgaaagcacagctcctcccccagcccttgggaccatcttctcctgcagtcccctgggccccagtgagaggggcaggggcagggccggcagtaggtggggcctgtggtccccccactgccctgagggcattagctggtctaactgcccggaggcacccggccctgggccttaggcacctcaaggacttttctgctatttactgctcttattgttaaggataataattaaggatcatatgaataattaatgaagatgctgatgactatgaataataaataattatcctgaggaga

SEQ ID NO: 935 - DNA, 3884 bp, Homo sapiens
  source 1..3884: mol_type = genomic DNA
  misc_feature 1..3884: note = cDNA of KCNH2 gene SNP c.613C>T (p.Pro205Ser)
atgccggtgcggaggggccacgtcgcgccgcagaacaccttcctggacaccatcatccgcaagtttgagggccagagccgtaagttcatcatcgccaacgctcgggtggagaactgcgccgtcatctactgcaacgacggcttctgcgagctgtgcggctactcgcgggccgaggtgatgcagcgaccctgcacctgcgacttcctgcacgggccgcgcacgcagcgccgcgctgccgcgcagatcgcgcaggcactgctgggcgccgaggagcgcaaagtggaaatcgccttctaccggaaagatgggagctgcttcctatgtctggtggatgtggtgcccgtgaagaacgaggatggggctgtcatcatgttcatcctcaatttcgaggtggtgatggagaaggacatggtggggtccccggctcatgacaccaaccaccggggcccccccaccagctggctggccccaggccgcgccaagaccttccgcctgaagctgcccgcgctgctggcgctgacggcccgggagtcgtcggtgcggtcgggcggcgcgggcggcgcgggcgccccgggggccgtggtggtggacgtggacctgacgcccgcggcatccagcagcgagtcgctggccctggacgaagtgacagccatggacaaccacgtggcagggctcgggcccgcggaggagcggcgtgcgctggtgggtcccggctctccgccccgcagcgcgcccggccagctcccatcgccccgggcgcacagcctcaaccccgacgcctcgggctccagctgcagcctggcccggacgcgctcccgagaaagctgcgccagcgtgcgccgcgcctcgtcggccgacgacatcgaggccatgcgcgccggggtgctgcccccgccaccgcgccacgccagcaccggggccatgcacccactgcgcagcggcttgctcaactccacctcggactccgacctcgtgcgctaccgcaccattagcaagattccccaaatcaccctcaactttgtggacctcaagggcgaccccttcttggcttcgcccaccagtgaccgtgagatcatagcacctaagataaaggagcgaacccacaatgtcactgagaaggtcacccaggtcctgtccctgggcgccgacgtgctgcctgagtacaagctgcaggcaccgcgcatccaccgctggaccatcctgcattacagccccttcaaggccgtgtgggactggctcatcctgctgctggtcatctacacggctgtcttcacaccctactcggctgccttcctgctgaaggagacggaagaaggcccgcctgctaccgagtgtggctacgcctgccagccgctggctgtggtggacctcatcgtggacatcatgttcattgtggacatcctcatcaacttccgcaccacctacgtcaatgccaacgaggaggtggtcagccaccccggccgcatcgccgtccactacttcaagggctggttcctcatcgacatggtggccgccatccccttcgacctgctcatcttcggctctggctctgaggagctgatcgggctgctgaagactgcgcggctgctgcggctggtgcgcgtggcgcggaagctggatcgctactcagagtacggcgcggccgtgctgttcttgctcatgtgcacctttgcgctcatcgcgcactggctagcctgcatctggtacgccatcggcaacatggagcagccacacatggactcacgcatcggctggctgcacaacctgggcgaccagataggcaaaccctacaacagcagcggcctgggcggcccctccatcaaggacaagtatgtgacggcgctctacttcaccttcagcagcctcaccagtgtgggcttcggcaacgtctctcccaacaccaactcagagaagatcttctccatctgcgtcatgctcattggctccctcatgtatgctagcatcttcggcaacgtgtcggccatcatccagcggctgtactcgggcacagcccgctaccacacacagatgctgcgggtgcgggagttcatccgcttccaccagatccccaatcccctgcgccagcgcctcgaggagtacttccagcacgcctggtcctacaccaacggcatcgacatgaacgcggtgctgaagggcttccctgagtgcctgcaggctgacatctgcctgcacctgaaccgctcactgctgcagcactgcaaacccttccgaggggccaccaagggctgccttcgggccctggccatgaagttcaagaccacacatgcaccgccaggggacacactggtgcatgctggggacctgctcaccgccctgtacttcatctcccggggctccatcgagatcctgcggggcgacgtcgtcgtggccatcctggggaagaatgacatctttggggagcctctgaacctgtatgcaaggcctggcaagtcgaacggggatgtgcgggccctcacctactgtgacctacacaagatccatcgggacgacctgctggaggtgctggacatgtaccctgagttctccgaccacttctggtccagcctggagatcaccttcaacctgcgagataccaacatgatcccgggctcccccggcagtacggagttagagggtggcttcagtcggcaacgcaagcgcaagttgtccttccgcaggcgcacggacaaggacacggagcagccaggggaggtgtcggccttggggccgggccgggcgggggcagggccgagtagccggggccggccgggggggccgtggggggagagcccgtccagtggcccctccagccctgagagcagtgaggatgagggcccaggccgcagctccagccccctccgcctggtgcccttctccagccccaggccccccggagagccgccgggtggggagcccctgatggaggactgcgagaagagcagcgacacttgcaaccccctgtcaggcgccttctcaggagtgtccaacattttcagcttctggggggacagtcggggccgccagtaccaggagctccctcgatgccccgcccccacccccagcctcctcaacatccccctctccagcccgggtcggcggccccggggcgacgtggagagcaggctggatgccctccagcgccagctcaacaggctggagacccggctgagtgcagacatggccactgtcctgcagctgctacagaggcagatgacgctggtcccgcccgcctacagtgctgtgaccaccccggggcctggccccacttccacatccccgctgttgcccgtcagccccctccccaccctcaccttggactcgctttctcaggtttcccagttcatggcgtgtgaggagctgcccccgggggccccagagcttccccaagaaggccccacacgacgcctctccctaccgggccagctgggggccctcacctcccagcccctgcacagacacggctcggacccgggcagttagtggggctgcccagtgtggacacgtggctcacccagggatcaaggcgctgctgggccgctccccttggaggccctgctcaggaggccctgaccgtggaaggggagaggaactcgaaagcacagctcctcccccagcccttgggaccatcttctcctgcagtcccctgggccccagtgagaggggcaggggcagggccggcagtaggtggggcctgtggtccccccactgccctgagggcattagctggtctaactgcccggaggcacccggccctgggccttaggcacctcaaggacttttctgctatttactgctcttattgttaaggataataattaaggatcatatgaataattaatgaagatgctgatgactatgaataataaataattatcctgaggaga

SEQ ID NO: 936 - DNA, 3884 bp, Homo sapiens
  source 1..3884: mol_type = genomic DNA
  misc_feature 1..3884: note = cDNA of KCNH2 gene SNP c.614C>T (p.Pro205Leu)
atgccggtgcggaggggccacgtcgcgccgcagaacaccttcctggacaccatcatccgcaagtttgagggccagagccgtaagttcatcatcgccaacgctcgggtggagaactgcgccgtcatctactgcaacgacggcttctgcgagctgtgcggctactcgcgggccgaggtgatgcagcgaccctgcacctgcgacttcctgcacgggccgcgcacgcagcgccgcgctgccgcgcagatcgcgcaggcactgctgggcgccgaggagcgcaaagtggaaatcgccttctaccggaaagatgggagctgcttcctatgtctggtggatgtggtgcccgtgaagaacgaggatggggctgtcatcatgttcatcctcaatttcgaggtggtgatggagaaggacatggtggggtccccggctcatgacaccaaccaccggggcccccccaccagctggctggccccaggccgcgccaagaccttccgcctgaagctgcccgcgctgctggcgctgacggcccgggagtcgtcggtgcggtcgggcggcgcgggcggcgcgggcgccccgggggccgtggtggtggacgtggacctgacgcccgcggcactcagcagcgagtcgctggccctggacgaagtgacagccatggacaaccacgtggcagggctcgggcccgcggaggagcggcgtgcgctggtgggtcccggctctccgccccgcagcgcgcccggccagctcccatcgccccgggcgcacagcctcaaccccgacgcctcgggctccagctgcagcctggcccggacgcgctcccgagaaagctgcgccagcgtgcgccgcgcctcgtcggccgacgacatcgaggccatgcgcgccggggtgctgcccccgccaccgcgccacgccagcaccggggccatgcacccactgcgcagcggcttgctcaactccacctcggactccgacctcgtgcgctaccgcaccattagcaagattccccaaatcaccctcaactttgtggacctcaagggcgaccccttcttggcttcgcccaccagtgaccgtgagatcatagcacctaagataaaggagcgaacccacaatgtcactgagaaggtcacccaggtcctgtccctgggcgccgacgtgctgcctgagtacaagctgcaggcaccgcgcatccaccgctggaccatcctgcattacagccccttcaaggccgtgtgggactggctcatcctgctgctggtcatctacacggctgtcttcacaccctactcggctgccttcctgctgaaggagacggaagaaggcccgcctgctaccgagtgtggctacgcctgccagccgctggctgtggtggacctcatcgtggacatcatgttcattgtggacatcctcatcaacttccgcaccacctacgtcaatgccaacgaggaggtggtcagccaccccggccgcatcgccgtccactacttcaagggctggttcctcatcgacatggtggccgccatccccttcgacctgctcatcttcggctctggctctgaggagctgatcgggctgctgaagactgcgcggctgctgcggctggtgcgcgtggcgcggaagctggatcgctactcagagtacggcgcggccgtgctgttcttgctcatgtgcacctttgcgctcatcgcgcactggctagcctgcatctggtacgccatcggcaacatggagcagccacacatggactcacgcatcggctggctgcacaacctgggcgaccagataggcaaaccctacaacagcagcggcctgggcggcccctccatcaaggacaagtatgtgacggcgctctacttcaccttcagcagcctcaccagtgtgggcttcggcaacgtctctcccaacaccaactcagagaagatcttctccatctgcgtcatgctcattggctccctcatgtatgctagcatcttcggcaacgtgtcggccatcatccagcggctgtactcgggcacagcccgctaccacacacagatgctgcgggtgcgggagttcatccgcttccaccagatccccaatcccctgcgccagcgcctcgaggagtacttccagcacgcctggtcctacaccaacggcatcgacatgaacgcggtgctgaagggcttccctgagtgcctgcaggctgacatctgcctgcacctgaaccgctcactgctgcagcactgcaaacccttccgaggggccaccaagggctgccttcgggccctggccatgaagttcaagaccacacatgcaccgccaggggacacactggtgcatgctggggacctgctcaccgccctgtacttcatctcccggggctccatcgagatcctgcggggcgacgtcgtcgtggccatcctggggaagaatgacatctttggggagcctctgaacctgtatgcaaggcctggcaagtcgaacggggatgtgcgggccctcacctactgtgacctacacaagatccatcgggacgacctgctggaggtgctggacatgtaccctgagttctccgaccacttctggtccagcctggagatcaccttcaacctgcgagataccaacatgatcccgggctcccccggcagtacggagttagagggtggcttcagtcggcaacgcaagcgcaagttgtccttccgcaggcgcacggacaaggacacggagcagccaggggaggtgtcggccttggggccgggccgggcgggggcagggccgagtagccggggccggccgggggggccgtggggggagagcccgtccagtggcccctccagccctgagagcagtgaggatgagggcccaggccgcagctccagccccctccgcctggtgcccttctccagccccaggccccccggagagccgccgggtggggagcccctgatggaggactgcgagaagagcagcgacacttgcaaccccctgtcaggcgccttctcaggagtgtccaacattttcagcttctggggggacagtcggggccgccagtaccaggagctccctcgatgccccgcccccacccccagcctcctcaacatccccctctccagcccgggtcggcggccccggggcgacgtggagagcaggctggatgccctccagcgccagctcaacaggctggagacccggctgagtgcagacatggccactgtcctgcagctgctacagaggcagatgacgctggtcccgcccgcctacagtgctgtgaccaccccggggcctggccccacttccacatccccgctgttgcccgtcagccccctccccaccctcaccttggactcgctttctcaggtttcccagttcatggcgtgtgaggagctgcccccgggggccccagagcttccccaagaaggccccacacgacgcctctccctaccgggccagctgggggccctcacctcccagcccctgcacagacacggctcggacccgggcagttagtggggctgcccagtgtggacacgtggctcacccagggatcaaggcgctgctgggccgctccccttggaggccctgctcaggaggccctgaccgtggaaggggagaggaactcgaaagcacagctcctcccccagcccttgggaccatcttctcctgcagtcccctgggccccagtgagaggggcaggggcagggccggcagtaggtggggcctgtggtccccccactgccctgagggcattagctggtctaactgcccggaggcacccggccctgggccttaggcacctcaaggacttttctgctatttactgctcttattgttaaggataataattaaggatcatatgaataattaatgaagatgctgatgactatgaataataaataattatcctgaggaga

SEQ ID NO: 937 - DNA, 3884 bp, Homo sapiens
  source 1..3884: mol_type = genomic DNA
  misc_feature 1..3884: note = cDNA of KCNH2 gene SNP c.629T>C (p.Leu210Pro)
atgccggtgcggaggggccacgtcgcgccgcagaacaccttcctggacaccatcatccgcaagtttgagggccagagccgtaagttcatcatcgccaacgctcgggtggagaactgcgccgtcatctactgcaacgacggcttctgcgagctgtgcggctactcgcgggccgaggtgatgcagcgaccctgcacctgcgacttcctgcacgggccgcgcacgcagcgccgcgctgccgcgcagatcgcgcaggcactgctgggcgccgaggagcgcaaagtggaaatcgccttctaccggaaagatgggagctgcttcctatgtctggtggatgtggtgcccgtgaagaacgaggatggggctgtcatcatgttcatcctcaatttcgaggtggtgatggagaaggacatggtggggtccccggctcatgacaccaaccaccggggcccccccaccagctggctggccccaggccgcgccaagaccttccgcctgaagctgcccgcgctgctggcgctgacggcccgggagtcgtcggtgcggtcgggcggcgcgggcggcgcgggcgccccgggggccgtggtggtggacgtggacctgacgcccgcggcacccagcagcgagtcgccggccctggacgaagtgacagccatggacaaccacgtggcagggctcgggcccgcggaggagcggcgtgcgctggtgggtcccggctctccgccccgcagcgcgcccggccagctcccatcgccccgggcgcacagcctcaaccccgacgcctcgggctccagctgcagcctggcccggacgcgctcccgagaaagctgcgccagcgtgcgccgcgcctcgtcggccgacgacatcgaggccatgcgcgccggggtgctgcccccgccaccgcgccacgccagcaccggggccatgcacccactgcgcagcggcttgctcaactccacctcggactccgacctcgtgcgctaccgcaccattagcaagattccccaaatcaccctcaactttgtggacctcaagggcgaccccttcttggcttcgcccaccagtgaccgtgagatcatagcacctaagataaaggagcgaacccacaatgtcactgagaaggtcacccaggtcctgtccctgggcgccgacgtgctgcctgagtacaagctgcaggcaccgcgcatccaccgctggaccatcctgcattacagccccttcaaggccgtgtgggactggctcatcctgctgctggtcatctacacggctgtcttcacaccctactcggctgccttcctgctgaaggagacggaagaaggcccgcctgctaccgagtgtggctacgcctgccagccgctggctgtggtggacctcatcgtggacatcatgttcattgtggacatcctcatcaacttccgcaccacctacgtcaatgccaacgaggaggtggtcagccaccccggccgcatcgccgtccactacttcaagggctggttcctcatcgacatggtggccgccatccccttcgacctgctcatcttcggctctggctctgaggagctgatcgggctgctgaagactgcgcggctgctgcggctggtgcgcgtggcgcggaagctggatcgctactcagagtacggcgcggccgtgctgttcttgctcatgtgcacctttgcgctcatcgcgcactggctagcctgcatctggtacgccatcggcaacatggagcagccacacatggactcacgcatcggctggctgcacaacctgggcgaccagataggcaaaccctacaacagcagcggcctgggcggcccctccatcaaggacaagtatgtgacggcgctctacttcaccttcagcagcctcaccagtgtgggcttcggcaacgtctctcccaacaccaactcagagaagatcttctccatctgcgtcatgctcattggctccctcatgtatgctagcatcttcggcaacgtgtcggccatcatccagcggctgtactcgggcacagcccgctaccacacacagatgctgcgggtgcgggagttcatccgcttccaccagatccccaatcccctgcgccagcgcctcgaggagtacttccagcacgcctggtcctacaccaacggcatcgacatgaacgcggtgctgaagggcttccctgagtgcctgcaggctgacatctgcctgcacctgaaccgctcactgctgcagcactgcaaacccttccgaggggccaccaagggctgccttcgggccctggccatgaagttcaagaccacacatgcaccgccaggggacacactggtgcatgctggggacctgctcaccgccctgtacttcatctcccggggctccatcgagatcctgcggggcgacgtcgtcgtggccatcctggggaagaatgacatctttggggagcctctgaacctgtatgcaaggcctggcaagtcgaacggggatgtgcgggccctcacctactgtgacctacacaagatccatcgggacgacctgctggaggtgctggacatgtaccctgagttctccgaccacttctggtccagcctggagatcaccttcaacctgcgagataccaacatgatcccgggctcccccggcagtacggagttagagggtggcttcagtcggcaacgcaagcgcaagttgtccttccgcaggcgcacggacaaggacacggagcagccaggggaggtgtcggccttggggccgggccgggcgggggcagggccgagtagccggggccggccgggggggccgtggggggagagcccgtccagtggcccctccagccctgagagcagtgaggatgagggcccaggccgcagctccagccccctccgcctggtgcccttctccagccccaggccccccggagagccgccgggtggggagcccctgatggaggactgcgagaagagcagcgacacttgcaaccccctgtcaggcgccttctcaggagtgtccaacattttcagcttctggggggacagtcggggccgccagtaccaggagctccctcgatgccccgcccccacccccagcctcctcaacatccccctctccagcccgggtcggcggccccggggcgacgtggagagcaggctggatgccctccagcgccagctcaacaggctggagacccggctgagtgcagacatggccactgtcctgcagctgctacagaggcagatgacgctggtcccgcccgcctacagtgctgtgaccaccccggggcctggccccacttccacatccccgctgttgcccgtcagccccctccccaccctcaccttggactcgctttctcaggtttcccagttcatggcgtgtgaggagctgcccccgggggccccagagcttccccaagaaggccccacacgacgcctctccctaccgggccagctgggggccctcacctcccagcccctgcacagacacggctcggacccgggcagttagtggggctgcccagtgtggacacgtggctcacccagggatcaaggcgctgctgggccgctccccttggaggccctgctcaggaggccctgaccgtggaaggggagaggaactcgaaagcacagctcctcccccagcccttgggaccatcttctcctgcagtcccctgggccccagtgagaggggcaggggcagggccggcagtaggtggggcctgtggtccccccactgccctgagggcattagctggtctaactgcccggaggcacccggccctgggccttaggcacctcaaggacttttctgctatttactgctcttattgttaaggataataattaaggatcatatgaataattaatgaagatgctgatgactatgaataataaataattatcctgaggaga

SEQ ID NO: 938 - DNA, 3884 bp, Homo sapiens
  source 1..3884: mol_type = genomic DNA
  misc_feature 1..3884: note = cDNA of KCNH2 gene SNP c.638A>G (p.Asp213Gly)
atgccggtgcggaggggccacgtcgcgccgcagaacaccttcctggacaccatcatccgcaagtttgagggccagagccgtaagttcatcatcgccaacgctcgggtggagaactgcgccgtcatctactgcaacgacggcttctgcgagctgtgcggctactcgcgggccgaggtgatgcagcgaccctgcacctgcgacttcctgcacgggccgcgcacgcagcgccgcgctgccgcgcagatcgcgcaggcactgctgggcgccgaggagcgcaaagtggaaatcgccttctaccggaaagatgggagctgcttcctatgtctggtggatgtggtgcccgtgaagaacgaggatggggctgtcatcatgttcatcctcaatttcgaggtggtgatggagaaggacatggtggggtccccggctcatgacaccaaccaccggggcccccccaccagctggctggccccaggccgcgccaagaccttccgcctgaagctgcccgcgctgctggcgctgacggcccgggagtcgtcggtgcggtcgggcggcgcgggcggcgcgggcgccccgggggccgtggtggtggacgtggacctgacgcccgcggcacccagcagcgagtcgctggccctgggcgaagtgacagccatggacaaccacgtggcagggctcgggcccgcggaggagcggcgtgcgctggtgggtcccggctctccgccccgcagcgcgcccggccagctcccatcgccccgggcgcacagcctcaaccccgacgcctcgggctccagctgcagcctggcccggacgcgctcccgagaaagctgcgccagcgtgcgccgcgcctcgtcggccgacgacatcgaggccatgcgcgccggggtgctgcccccgccaccgcgccacgccagcaccggggccatgcacccactgcgcagcggcttgctcaactccacctcggactccgacctcgtgcgctaccgcaccattagcaagattccccaaatcaccctcaactttgtggacctcaagggcgaccccttcttggcttcgcccaccagtgaccgtgagatcatagcacctaagataaaggagcgaacccacaatgtcactgagaaggtcacccaggtcctgtccctgggcgccgacgtgctgcctgagtacaagctgcaggcaccgcgcatccaccgctggaccatcctgcattacagccccttcaaggccgtgtgggactggctcatcctgctgctggtcatctacacggctgtcttcacaccctactcggctgccttcctgctgaaggagacggaagaaggcccgcctgctaccgagtgtggctacgcctgccagccgctggctgtggtggacctcatcgtggacatcatgttcattgtggacatcctcatcaacttccgcaccacctacgtcaatgccaacgaggaggtggtcagccaccccggccgcatcgccgtccactacttcaagggctggttcctcatcgacatggtggccgccatccccttcgacctgctcatcttcggctctggctctgaggagctgatcgggctgctgaagactgcgcggctgctgcggctggtgcgcgtggcgcggaagctggatcgctactcagagtacggcgcggccgtgctgttcttgctcatgtgcacctttgcgctcatcgcgcactggctagcctgcatctggtacgccatcggcaacatggagcagccacacatggactcacgcatcggctggctgcacaacctgggcgaccagataggcaaaccctacaacagcagcggcctgggcggcccctccatcaaggacaagtatgtgacggcgctctacttcaccttcagcagcctcaccagtgtgggcttcggcaacgtctctcccaacaccaactcagagaagatcttctccatctgcgtcatgctcattggctccctcatgtatgctagcatcttcggcaacgtgtcggccatcatccagcggctgtactcgggcacagcccgctaccacacacagatgctgcgggtgcgggagttcatccgcttccaccagatccccaatcccctgcgccagcgcctcgaggagtacttccagcacgcctggtcctacaccaacggcatcgacatgaacgcggtgctgaagggcttccctgagtgcctgcaggctgacatctgcctgcacctgaaccgctcactgctgcagcactgcaaacccttccgaggggccaccaagggctgccttcgggccctggccatgaagttcaagaccacacatgcaccgccaggggacacactggtgcatgctggggacctgctcaccgccctgtacttcatctcccggggctccatcgagatcctgcggggcgacgtcgtcgtggccatcctggggaagaatgacatctttggggagcctctgaacctgtatgcaaggcctggcaagtcgaacggggatgtgcgggccctcacctactgtgacctacacaagatccatcgggacgacctgctggaggtgctggacatgtaccctgagttctccgaccacttctggtccagcctggagatcaccttcaacctgcgagataccaacatgatcccgggctcccccggcagtacggagttagagggtggcttcagtcggcaacgcaagcgcaagttgtccttccgcaggcgcacggacaaggacacggagcagccaggggaggtgtcggccttggggccgggccgggcgggggcagggccgagtagccggggccggccgggggggccgtggggggagagcccgtccagtggcccctccagccctgagagcagtgaggatgagggcccaggccgcagctccagccccctccgcctggtgcccttctccagccccaggccccccggagagccgccgggtggggagcccctgatggaggactgcgagaagagcagcgacacttgcaaccccctgtcaggcgccttctcaggagtgtccaacattttcagcttctggggggacagtcggggccgccagtaccaggagctccctcgatgccccgcccccacccccagcctcctcaacatccccctctccagcccgggtcggcggccccggggcgacgtggagagcaggctggatgccctccagcgccagctcaacaggctggagacccggctgagtgcagacatggccactgtcctgcagctgctacagaggcagatgacgctggtcccgcccgcctacagtgctgtgaccaccccggggcctggccccacttccacatccccgctgttgcccgtcagccccctccccaccctcaccttggactcgctttctcaggtttcccagttcatggcgtgtgaggagctgcccccgggggccccagagcttccccaagaaggccccacacgacgcctctccctaccgggccagctgggggccctcacctcccagcccctgcacagacacggctcggacccgggcagttagtggggctgcccagtgtggacacgtggctcacccagggatcaaggcgctgctgggccgctccccttggaggccctgctcaggaggccctgaccgtggaaggggagaggaactcgaaagcacagctcctcccccagcccttgggaccatcttctcctgcagtcccctgggccccagtgagaggggcaggggcagggccggcagtaggtggggcctgtggtccccccactgccctgagggcattagctggtctaactgcccggaggcacccggccctgggccttaggcacctcaaggacttttctgctatttactgctcttattgttaaggataataattaaggatcatatgaataattaatgaagatgctgatgactatgaataataaataattatcctgaggaga

SEQ ID NO: 939 - DNA, 3884 bp, Homo sapiens
  source 1..3884: mol_type = genomic DNA
  misc_feature 1..3884: note = cDNA of KCNH2 gene SNP c.644T>G (p.Val215Gly)
atgccggtgcggaggggccacgtcgcgccgcagaacaccttcctggacaccatcatccgcaagtttgagggccagagccgtaagttcatcatcgccaacgctcgggtggagaactgcgccgtcatctactgcaacgacggcttctgcgagctgtgcggctactcgcgggccgaggtgatgcagcgaccctgcacctgcgacttcctgcacgggccgcgcacgcagcgccgcgctgccgcgcagatcgcgcaggcactgctgggcgccgaggagcgcaaagtggaaatcgccttctaccggaaagatgggagctgcttcctatgtctggtggatgtggtgcccgtgaagaacgaggatggggctgtcatcatgttcatcctcaatttcgaggtggtgatggagaaggacatggtggggtccccggctcatgacaccaaccaccggggcccccccaccagctggctggccccaggccgcgccaagaccttccgcctgaagctgcccgcgctgctggcgctgacggcccgggagtcgtcggtgcggtcgggcggcgcgggcggcgcgggcgccccgggggccgtggtggtggacgtggacctgacgcccgcggcacccagcagcgagtcgctggccctggacgaagggacagccatggacaaccacgtggcagggctcgggcccgcggaggagcggcgtgcgctggtgggtcccggctctccgccccgcagcgcgcccggccagctcccatcgccccgggcgcacagcctcaaccccgacgcctcgggctccagctgcagcctggcccggacgcgctcccgagaaagctgcgccagcgtgcgccgcgcctcgtcggccgacgacatcgaggccatgcgcgccggggtgctgcccccgccaccgcgccacgccagcaccggggccatgcacccactgcgcagcggcttgctcaactccacctcggactccgacctcgtgcgctaccgcaccattagcaagattccccaaatcaccctcaactttgtggacctcaagggcgaccccttcttggcttcgcccaccagtgaccgtgagatcatagcacctaagataaaggagcgaacccacaatgtcactgagaaggtcacccaggtcctgtccctgggcgccgacgtgctgcctgagtacaagctgcaggcaccgcgcatccaccgctggaccatcctgcattacagccccttcaaggccgtgtgggactggctcatcctgctgctggtcatctacacggctgtcttcacaccctactcggctgccttcctgctgaaggagacggaagaaggcccgcctgctaccgagtgtggctacgcctgccagccgctggctgtggtggacctcatcgtggacatcatgttcattgtggacatcctcatcaacttccgcaccacctacgtcaatgccaacgaggaggtggtcagccaccccggccgcatcgccgtccactacttcaagggctggttcctcatcgacatggtggccgccatccccttcgacctgctcatcttcggctctggctctgaggagctgatcgggctgctgaagactgcgcggctgctgcggctggtgcgcgtggcgcggaagctggatcgctactcagagtacggcgcggccgtgctgttcttgctcatgtgcacctttgcgctcatcgcgcactggctagcctgcatctggtacgccatcggcaacatggagcagccacacatggactcacgcatcggctggctgcacaacctgggcgaccagataggcaaaccctacaacagcagcggcctgggcggcccctccatcaaggacaagtatgtgacggcgctctacttcaccttcagcagcctcaccagtgtgggcttcggcaacgtctctcccaacaccaactcagagaagatcttctccatctgcgtcatgctcattggctccctcatgtatgctagcatcttcggcaacgtgtcggccatcatccagcggctgtactcgggcacagcccgctaccacacacagatgctgcgggtgcgggagttcatccgcttccaccagatccccaatcccctgcgccagcgcctcgaggagtacttccagcacgcctggtcctacaccaacggcatcgacatgaacgcggtgctgaagggcttccctgagtgcctgcaggctgacatctgcctgcacctgaaccgctcactgctgcagcactgcaaacccttccgaggggccaccaagggctgccttcgggccctggccatgaagttcaagaccacacatgcaccgccaggggacacactggtgcatgctggggacctgctcaccgccctgtacttcatctcccggggctccatcgagatcctgcggggcgacgtcgtcgtggccatcctggggaagaatgacatctttggggagcctctgaacctgtatgcaaggcctggcaagtcgaacggggatgtgcgggccctcacctactgtgacctacacaagatccatcgggacgacctgctggaggtgctggacatgtaccctgagttctccgaccacttctggtccagcctggagatcaccttcaacctgcgagataccaacatgatcccgggctcccccggcagtacggagttagagggtggcttcagtcggcaacgcaagcgcaagttgtccttccgcaggcgcacggacaaggacacggagcagccaggggaggtgtcggccttggggccgggccgggcgggggcagggccgagtagccggggccggccgggggggccgtggggggagagcccgtccagtggcccctccagccctgagagcagtgaggatgagggcccaggccgcagctccagccccctccgcctggtgcccttctccagccccaggccccccggagagccgccgggtggggagcccctgatggaggactgcgagaagagcagcgacacttgcaaccccctgtcaggcgccttctcaggagtgtccaacattttcagcttctggggggacagtcggggccgccagtaccaggagctccctcgatgccccgcccccacccccagcctcctcaacatccccctctccagcccgggtcggcggccccggggcgacgtggagagcaggctggatgccctccagcgccagctcaacaggctggagacccggctgagtgcagacatggccactgtcctgcagctgctacagaggcagatgacgctggtcccgcccgcctacagtgctgtgaccaccccggggcctggccccacttccacatccccgctgttgcccgtcagccccctccccaccctcaccttggactcgctttctcaggtttcccagttcatggcgtgtgaggagctgcccccgggggccccagagcttccccaagaaggccccacacgacgcctctccctaccgggccagctgggggccctcacctcccagcccctgcacagacacggctcggacccgggcagttagtggggctgcccagtgtggacacgtggctcacccagggatcaaggcgctgctgggccgctccccttggaggccctgctcaggaggccctgaccgtggaaggggagaggaactcgaaagcacagctcctcccccagcccttgggaccatcttctcctgcagtcccctgggccccagtgagaggggcaggggcagggccggcagtaggtggggcctgtggtccccccactgccctgagggcattagctggtctaactgcccggaggcacccggccctgggccttaggcacctcaaggacttttctgctatttactgctcttattgttaaggataataattaaggatcatatgaataattaatgaagatgctgatgactatgaataataaataattatcctgaggaga

SEQ ID NO: 940 - DNA, 3884 bp, Homo sapiens
  source 1..3884: mol_type = genomic DNA
  misc_feature 1..3884: note = cDNA of KCNH2 gene SNP c.647C>T (p.Thr216Ile)
atgccggtgcggaggggccacgtcgcgccgcagaacaccttcctggacaccatcatccgcaagtttgagggccagagccgtaagttcatcatcgccaacgctcgggtggagaactgcgccgtcatctactgcaacgacggcttctgcgagctgtgcggctactcgcgggccgaggtgatgcagcgaccctgcacctgcgacttcctgcacgggccgcgcacgcagcgccgcgctgccgcgcagatcgcgcaggcactgctgggcgccgaggagcgcaaagtggaaatcgccttctaccggaaagatgggagctgcttcctatgtctggtggatgtggtgcccgtgaagaacgaggatggggctgtcatcatgttcatcctcaatttcgaggtggtgatggagaaggacatggtggggtccccggctcatgacaccaaccaccggggcccccccaccagctggctggccccaggccgcgccaagaccttccgcctgaagctgcccgcgctgctggcgctgacggcccgggagtcgtcggtgcggtcgggcggcgcgggcggcgcgggcgccccgggggccgtggtggtggacgtggacctgacgcccgcggcacccagcagcgagtcgctggccctggacgaagtgatagccatggacaaccacgtggcagggctcgggcccgcggaggagcggcgtgcgctggtgggtcccggctctccgccccgcagcgcgcccggccagctcccatcgccccgggcgcacagcctcaaccccgacgcctcgggctccagctgcagcctggcccggacgcgctcccgagaaagctgcgccagcgtgcgccgcgcctcgtcggccgacgacatcgaggccatgcgcgccggggtgctgcccccgccaccgcgccacgccagcaccggggccatgcacccactgcgcagcggcttgctcaactccacctcggactccgacctcgtgcgctaccgcaccattagcaagattccccaaatcaccctcaactttgtggacctcaagggcgaccccttcttggcttcgcccaccagtgaccgtgagatcatagcacctaagataaaggagcgaacccacaatgtcactgagaaggtcacccaggtcctgtccctgggcgccgacgtgctgcctgagtacaagctgcaggcaccgcgcatccaccgctggaccatcctgcattacagccccttcaaggccgtgtgggactggctcatcctgctgctggtcatctacacggctgtcttcacaccctactcggctgccttcctgctgaaggagacggaagaaggcccgcctgctaccgagtgtggctacgcctgccagccgctggctgtggtggacctcatcgtggacatcatgttcattgtggacatcctcatcaacttccgcaccacctacgtcaatgccaacgaggaggtggtcagccaccccggccgcatcgccgtccactacttcaagggctggttcctcatcgacatggtggccgccatccccttcgacctgctcatcttcggctctggctctgaggagctgatcgggctgctgaagactgcgcggctgctgcggctggtgcgcgtggcgcggaagctggatcgctactcagagtacggcgcggccgtgctgttcttgctcatgtgcacctttgcgctcatcgcgcactggctagcctgcatctggtacgccatcggcaacatggagcagccacacatggactcacgcatcggctggctgcacaacctgggcgaccagataggcaaaccctacaacagcagcggcctgggcggcccctccatcaaggacaagtatgtgacggcgctctacttcaccttcagcagcctcaccagtgtgggcttcggcaacgtctctcccaacaccaactcagagaagatcttctccatctgcgtcatgctcattggctccctcatgtatgctagcatcttcggcaacgtgtcggccatcatccagcggctgtactcgggcacagcccgctaccacacacagatgctgcgggtgcgggagttcatccgcttccaccagatccccaatcccctgcgccagcgcctcgaggagtacttccagcacgcctggtcctacaccaacggcatcgacatgaacgcggtgctgaagggcttccctgagtgcctgcaggctgacatctgcctgcacctgaaccgctcactgctgcagcactgcaaacccttccgaggggccaccaagggctgccttcgggccctggccatgaagttcaagaccacacatgcaccgccaggggacacactggtgcatgctggggacctgctcaccgccctgtacttcatctcccggggctccatcgagatcctgcggggcgacgtcgtcgtggccatcctggggaagaatgacatctttggggagcctctgaacctgtatgcaaggcctggcaagtcgaacggggatgtgcgggccctcacctactgtgacctacacaagatccatcgggacgacctgctggaggtgctggacatgtaccctgagttctccgaccacttctggtccagcctggagatcaccttcaacctgcgagataccaacatgatcccgggctcccccggcagtacggagttagagggtggcttcagtcggcaacgcaagcgcaagttgtccttccgcaggcgcacggacaaggacacggagcagccaggggaggtgtcggccttggggccgggccgggcgggggcagggccgagtagccggggccggccgggggggccgtggggggagagcccgtccagtggcccctccagccctgagagcagtgaggatgagggcccaggccgcagctccagccccctccgcctggtgcccttctccagccccaggccccccggagagccgccgggtggggagcccctgatggaggactgcgagaagagcagcgacacttgcaaccccctgtcaggcgccttctcaggagtgtccaacattttcagcttctggggggacagtcggggccgccagtaccaggagctccctcgatgccccgcccccacccccagcctcctcaacatccccctctccagcccgggtcggcggccccggggcgacgtggagagcaggctggatgccctccagcgccagctcaacaggctggagacccggctgagtgcagacatggccactgtcctgcagctgctacagaggcagatgacgctggtcccgcccgcctacagtgctgtgaccaccccggggcctggccccacttccacatccccgctgttgcccgtcagccccctccccaccctcaccttggactcgctttctcaggtttcccagttcatggcgtgtgaggagctgcccccgggggccccagagcttccccaagaaggccccacacgacgcctctccctaccgggccagctgggggccctcacctcccagcccctgcacagacacggctcggacccgggcagttagtggggctgcccagtgtggacacgtggctcacccagggatcaaggcgctgctgggccgctccccttggaggccctgctcaggaggccctgaccgtggaaggggagaggaactcgaaagcacagctcctcccccagcccttgggaccatcttctcctgcagtcccctgggccccagtgagaggggcaggggcagggccggcagtaggtggggcctgtggtccccccactgccctgagggcattagctggtctaactgcccggaggcacccggccctgggccttaggcacctcaaggacttttctgctatttactgctcttattgttaaggataataattaaggatcatatgaataattaatgaagatgctgatgactatgaataataaataattatcctgaggaga

SEQ ID NO: 941 - DNA, 3884 bp, Homo sapiens
  source 1..3884: mol_type = genomic DNA
  misc_feature 1..3884: note = cDNA of KCNH2 gene SNP c.652A>G (p.Met218Val)
atgccggtgcggaggggccacgtcgcgccgcagaacaccttcctggacaccatcatccgcaagtttgagggccagagccgtaagttcatcatcgccaacgctcgggtggagaactgcgccgtcatctactgcaacgacggcttctgcgagctgtgcggctactcgcgggccgaggtgatgcagcgaccctgcacctgcgacttcctgcacgggccgcgcacgcagcgccgcgctgccgcgcagatcgcgcaggcactgctgggcgccgaggagcgcaaagtggaaatcgccttctaccggaaagatgggagctgcttcctatgtctggtggatgtggtgcccgtgaagaacgaggatggggctgtcatcatgttcatcctcaatttcgaggtggtgatggagaaggacatggtggggtccccggctcatgacaccaaccaccggggcccccccaccagctggctggccccaggccgcgccaagaccttccgcctgaagctgcccgcgctgctggcgctgacggcccgggagtcgtcggtgcggtcgggcggcgcgggcggcgcgggcgccccgggggccgtggtggtggacgtggacctgacgcccgcggcacccagcagcgagtcgctggccctggacgaagtgacagccgtggacaaccacgtggcagggctcgggcccgcggaggagcggcgtgcgctggtgggtcccggctctccgccccgcagcgcgcccggccagctcccatcgccccgggcgcacagcctcaaccccgacgcctcgggctccagctgcagcctggcccggacgcgctcccgagaaagctgcgccagcgtgcgccgcgcctcgtcggccgacgacatcgaggccatgcgcgccggggtgctgcccccgccaccgcgccacgccagcaccggggccatgcacccactgcgcagcggcttgctcaactccacctcggactccgacctcgtgcgctaccgcaccattagcaagattccccaaatcaccctcaactttgtggacctcaagggcgaccccttcttggcttcgcccaccagtgaccgtgagatcatagcacctaagataaaggagcgaacccacaatgtcactgagaaggtcacccaggtcctgtccctgggcgccgacgtgctgcctgagtacaagctgcaggcaccgcgcatccaccgctggaccatcctgcattacagccccttcaaggccgtgtgggactggctcatcctgctgctggtcatctacacggctgtcttcacaccctactcggctgccttcctgctgaaggagacggaagaaggcccgcctgctaccgagtgtggctacgcctgccagccgctggctgtggtggacctcatcgtggacatcatgttcattgtggacatcctcatcaacttccgcaccacctacgtcaatgccaacgaggaggtggtcagccaccccggccgcatcgccgtccactacttcaagggctggttcctcatcgacatggtggccgccatccccttcgacctgctcatcttcggctctggctctgaggagctgatcgggctgctgaagactgcgcggctgctgcggctggtgcgcgtggcgcggaagctggatcgctactcagagtacggcgcggccgtgctgttcttgctcatgtgcacctttgcgctcatcgcgcactggctagcctgcatctggtacgccatcggcaacatggagcagccacacatggactcacgcatcggctggctgcacaacctgggcgaccagataggcaaaccctacaacagcagcggcctgggcggcccctccatcaaggacaagtatgtgacggcgctctacttcaccttcagcagcctcaccagtgtgggcttcggcaacgtctctcccaacaccaactcagagaagatcttctccatctgcgtcatgctcattggctccctcatgtatgctagcatcttcggcaacgtgtcggccatcatccagcggctgtactcgggcacagcccgctaccacacacagatgctgcgggtgcgggagttcatccgcttccaccagatccccaatcccctgcgccagcgcctcgaggagtacttccagcacgcctggtcctacaccaacggcatcgacatgaacgcggtgctgaagggcttccctgagtgcctgcaggctgacatctgcctgcacctgaaccgctcactgctgcagcactgcaaacccttccgaggggccaccaagggctgccttcgggccctggccatgaagttcaagaccacacatgcaccgccaggggacacactggtgcatgctggggacctgctcaccgccctgtacttcatctcccggggctccatcgagatcctgcggggcgacgtcgtcgtggccatcctggggaagaatgacatctttggggagcctctgaacctgtatgcaaggcctggcaagtcgaacggggatgtgcgggccctcacctactgtgacctacacaagatccatcgggacgacctgctggaggtgctggacatgtaccctgagttctccgaccacttctggtccagcctggagatcaccttcaacctgcgagataccaacatgatcccgggctcccccggcagtacggagttagagggtggcttcagtcggcaacgcaagcgcaagttgtccttccgcaggcgcacggacaaggacacggagcagccaggggaggtgtcggccttggggccgggccgggcgggggcagggccgagtagccggggccggccgggggggccgtggggggagagcccgtccagtggcccctccagccctgagagcagtgaggatgagggcccaggccgcagctccagccccctccgcctggtgcccttctccagccccaggccccccggagagccgccgggtggggagcccctgatggaggactgcgagaagagcagcgacacttgcaaccccctgtcaggcgccttctcaggagtgtccaacattttcagcttctggggggacagtcggggccgccagtaccaggagctccctcgatgccccgcccccacccccagcctcctcaacatccccctctccagcccgggtcggcggccccggggcgacgtggagagcaggctggatgccctccagcgccagctcaacaggctggagacccggctgagtgcagacatggccactgtcctgcagctgctacagaggcagatgacgctggtcccgcccgcctacagtgctgtgaccaccccggggcctggccccacttccacatccccgctgttgcccgtcagccccctccccaccctcaccttggactcgctttctcaggtttcccagttcatggcgtgtgaggagctgcccccgggggccccagagcttccccaagaaggccccacacgacgcctctccctaccgggccagctgggggccctcacctcccagcccctgcacagacacggctcggacccgggcagttagtggggctgcccagtgtggacacgtggctcacccagggatcaaggcgctgctgggccgctccccttggaggccctgctcaggaggccctgaccgtggaaggggagaggaactcgaaagcacagctcctcccccagcccttgggaccatcttctcctgcagtcccctgggccccagtgagaggggcaggggcagggccggcagtaggtggggcctgtggtccccccactgccctgagggcattagctggtctaactgcccggaggcacccggccctgggccttaggcacctcaaggacttttctgctatttactgctcttattgttaaggataataattaaggatcatatgaataattaatgaagatgctgatgactatgaataataaataattatcctgaggaga

SEQ ID NO: 942 - DNA, 3884 bp, Homo sapiens
  source 1..3884: mol_type = genomic DNA
  misc_feature 1..3884: note = cDNA of KCNH2 gene SNP c.655G>A (p.Asp219Asn)
atgccggtgcggaggggccacgtcgcgccgcagaacaccttcctggacaccatcatccgcaagtttgagggccagagccgtaagttcatcatcgccaacgctcgggtggagaactgcgccgtcatctactgcaacgacggcttctgcgagctgtgcggctactcgcgggccgaggtgatgcagcgaccctgcacctgcgacttcctgcacgggccgcgcacgcagcgccgcgctgccgcgcagatcgcgcaggcactgctgggcgccgaggagcgcaaagtggaaatcgccttctaccggaaagatgggagctgcttcctatgtctggtggatgtggtgcccgtgaagaacgaggatggggctgtcatcatgttcatcctcaatttcgaggtggtgatggagaaggacatggtggggtccccggctcatgacaccaaccaccggggcccccccaccagctggctggccccaggccgcgccaagaccttccgcctgaagctgcccgcgctgctggcgctgacggcccgggagtcgtcggtgcggtcgggcggcgcgggcggcgcgggcgccccgggggccgtggtggtggacgtggacctgacgcccgcggcacccagcagcgagtcgctggccctggacgaagtgacagccatgaacaaccacgtggcagggctcgggcccgcggaggagcggcgtgcgctggtgggtcccggctctccgccccgcagcgcgcccggccagctcccatcgccccgggcgcacagcctcaaccccgacgcctcgggctccagctgcagcctggcccggacgcgctcccgagaaagctgcgccagcgtgcgccgcgcctcgtcggccgacgacatcgaggccatgcgcgccggggtgctgcccccgccaccgcgccacgccagcaccggggccatgcacccactgcgcagcggcttgctcaactccacctcggactccgacctcgtgcgctaccgcaccattagcaagattccccaaatcaccctcaactttgtggacctcaagggcgaccccttcttggcttcgcccaccagtgaccgtgagatcatagcacctaagataaaggagcgaacccacaatgtcactgagaaggtcacccaggtcctgtccctgggcgccgacgtgctgcctgagtacaagctgcaggcaccgcgcatccaccgctggaccatcctgcattacagccccttcaaggccgtgtgggactggctcatcctgctgctggtcatctacacggctgtcttcacaccctactcggctgccttcctgctgaaggagacggaagaaggcccgcctgctaccgagtgtggctacgcctgccagccgctggctgtggtggacctcatcgtggacatcatgttcattgtggacatcctcatcaacttccgcaccacctacgtcaatgccaacgaggaggtggtcagccaccccggccgcatcgccgtccactacttcaagggctggttcctcatcgacatggtggccgccatccccttcgacctgctcatcttcggctctggctctgaggagctgatcgggctgctgaagactgcgcggctgctgcggctggtgcgcgtggcgcggaagctggatcgctactcagagtacggcgcggccgtgctgttcttgctcatgtgcacctttgcgctcatcgcgcactggctagcctgcatctggtacgccatcggcaacatggagcagccacacatggactcacgcatcggctggctgcacaacctgggcgaccagataggcaaaccctacaacagcagcggcctgggcggcccctccatcaaggacaagtatgtgacggcgctctacttcaccttcagcagcctcaccagtgtgggcttcggcaacgtctctcccaacaccaactcagagaagatcttctccatctgcgtcatgctcattggctccctcatgtatgctagcatcttcggcaacgtgtcggccatcatccagcggctgtactcgggcacagcccgctaccacacacagatgctgcgggtgcgggagttcatccgcttccaccagatccccaatcccctgcgccagcgcctcgaggagtacttccagcacgcctggtcctacaccaacggcatcgacatgaacgcggtgctgaagggcttccctgagtgcctgcaggctgacatctgcctgcacctgaaccgctcactgctgcagcactgcaaacccttccgaggggccaccaagggctgccttcgggccctggccatgaagttcaagaccacacatgcaccgccaggggacacactggtgcatgctggggacctgctcaccgccctgtacttcatctcccggggctccatcgagatcctgcggggcgacgtcgtcgtggccatcctggggaagaatgacatctttggggagcctctgaacctgtatgcaaggcctggcaagtcgaacggggatgtgcgggccctcacctactgtgacctacacaagatccatcgggacgacctgctggaggtgctggacatgtaccctgagttctccgaccacttctggtccagcctggagatcaccttcaacctgcgagataccaacatgatcccgggctcccccggcagtacggagttagagggtggcttcagtcggcaacgcaagcgcaagttgtccttccgcaggcgcacggacaaggacacggagcagccaggggaggtgtcggccttggggccgggccgggcgggggcagggccgagtagccggggccggccgggggggccgtggggggagagcccgtccagtggcccctccagccctgagagcagtgaggatgagggcccaggccgcagctccagccccctccgcctggtgcccttctccagccccaggccccccggagagccgccgggtggggagcccctgatggaggactgcgagaagagcagcgacacttgcaaccccctgtcaggcgccttctcaggagtgtccaacattttcagcttctggggggacagtcggggccgccagtaccaggagctccctcgatgccccgcccccacccccagcctcctcaacatccccctctccagcccgggtcggcggccccggggcgacgtggagagcaggctggatgccctccagcgccagctcaacaggctggagacccggctgagtgcagacatggccactgtcctgcagctgctacagaggcagatgacgctggtcccgcccgcctacagtgctgtgaccaccccggggcctggccccacttccacatccccgctgttgcccgtcagccccctccccaccctcaccttggactcgctttctcaggtttcccagttcatggcgtgtgaggagctgcccccgggggccccagagcttccccaagaaggccccacacgacgcctctccctaccgggccagctgggggccctcacctcccagcccctgcacagacacggctcggacccgggcagttagtggggctgcccagtgtggacacgtggctcacccagggatcaaggcgctgctgggccgctccccttggaggccctgctcaggaggccctgaccgtggaaggggagaggaactcgaaagcacagctcctcccccagcccttgggaccatcttctcctgcagtcccctgggccccagtgagaggggcaggggcagggccggcagtaggtggggcctgtggtccccccactgccctgagggcattagctggtctaactgcccggaggcacccggccctgggccttaggcacctcaaggacttttctgctatttactgctcttattgttaaggataataattaaggatcatatgaataattaatgaagatgctgatgactatgaataataaataattatcctgaggaga

SEQ ID NO: 943 - DNA, 3884 bp, Homo sapiens
  source 1..3884: mol_type = genomic DNA
  misc_feature 1..3884: note = cDNA of KCNH2 gene SNP c.656A>T (p.Asp219Val)
atgccggtgcggaggggccacgtcgcgccgcagaacaccttcctggacaccatcatccgcaagtttgagggccagagccgtaagttcatcatcgccaacgctcgggtggagaactgcgccgtcatctactgcaacgacggcttctgcgagctgtgcggctactcgcgggccgaggtgatgcagcgaccctgcacctgcgacttcctgcacgggccgcgcacgcagcgccgcgctgccgcgcagatcgcgcaggcactgctgggcgccgaggagcgcaaagtggaaatcgccttctaccggaaagatgggagctgcttcctatgtctggtggatgtggtgcccgtgaagaacgaggatggggctgtcatcatgttcatcctcaatttcgaggtggtgatggagaaggacatggtggggtccccggctcatgacaccaaccaccggggcccccccaccagctggctggccccaggccgcgccaagaccttccgcctgaagctgcccgcgctgctggcgctgacggcccgggagtcgtcggtgcggtcgggcggcgcgggcggcgcgggcgccccgggggccgtggtggtggacgtggacctgacgcccgcggcacccagcagcgagtcgctggccctggacgaagtgacagccatggtcaaccacgtggcagggctcgggcccgcggaggagcggcgtgcgctggtgggtcccggctctccgccccgcagcgcgcccggccagctcccatcgccccgggcgcacagcctcaaccccgacgcctcgggctccagctgcagcctggcccggacgcgctcccgagaaagctgcgccagcgtgcgccgcgcctcgtcggccgacgacatcgaggccatgcgcgccggggtgctgcccccgccaccgcgccacgccagcaccggggccatgcacccactgcgcagcggcttgctcaactccacctcggactccgacctcgtgcgctaccgcaccattagcaagattccccaaatcaccctcaactttgtggacctcaagggcgaccccttcttggcttcgcccaccagtgaccgtgagatcatagcacctaagataaaggagcgaacccacaatgtcactgagaaggtcacccaggtcctgtccctgggcgccgacgtgctgcctgagtacaagctgcaggcaccgcgcatccaccgctggaccatcctgcattacagccccttcaaggccgtgtgggactggctcatcctgctgctggtcatctacacggctgtcttcacaccctactcggctgccttcctgctgaaggagacggaagaaggcccgcctgctaccgagtgtggctacgcctgccagccgctggctgtggtggacctcatcgtggacatcatgttcattgtggacatcctcatcaacttccgcaccacctacgtcaatgccaacgaggaggtggtcagccaccccggccgcatcgccgtccactacttcaagggctggttcctcatcgacatggtggccgccatccccttcgacctgctcatcttcggctctggctctgaggagctgatcgggctgctgaagactgcgcggctgctgcggctggtgcgcgtggcgcggaagctggatcgctactcagagtacggcgcggccgtgctgttcttgctcatgtgcacctttgcgctcatcgcgcactggctagcctgcatctggtacgccatcggcaacatggagcagccacacatggactcacgcatcggctggctgcacaacctgggcgaccagataggcaaaccctacaacagcagcggcctgggcggcccctccatcaaggacaagtatgtgacggcgctctacttcaccttcagcagcctcaccagtgtgggcttcggcaacgtctctcccaacaccaactcagagaagatcttctccatctgcgtcatgctcattggctccctcatgtatgctagcatcttcggcaacgtgtcggccatcatccagcggctgtactcgggcacagcccgctaccacacacagatgctgcgggtgcgggagttcatccgcttccaccagatccccaatcccctgcgccagcgcctcgaggagtacttccagcacgcctggtcctacaccaacggcatcgacatgaacgcggtgctgaagggcttccctgagtgcctgcaggctgacatctgcctgcacctgaaccgctcactgctgcagcactgcaaacccttccgaggggccaccaagggctgccttcgggccctggccatgaagttcaagaccacacatgcaccgccaggggacacactggtgcatgctggggacctgctcaccgccctgtacttcatctcccggggctccatcgagatcctgcggggcgacgtcgtcgtggccatcctggggaagaatgacatctttggggagcctctgaacctgtatgcaaggcctggcaagtcgaacggggatgtgcgggccctcacctactgtgacctacacaagatccatcgggacgacctgctggaggtgctggacatgtaccctgagttctccgaccacttctggtccagcctggagatcaccttcaacctgcgagataccaacatgatcccgggctcccccggcagtacggagttagagggtggcttcagtcggcaacgcaagcgcaagttgtccttccgcaggcgcacggacaaggacacggagcagccaggggaggtgtcggccttggggccgggccgggcgggggcagggccgagtagccggggccggccgggggggccgtggggggagagcccgtccagtggcccctccagccctgagagcagtgaggatgagggcccaggccgcagctccagccccctccgcctggtgcccttctccagccccaggccccccggagagccgccgggtggggagcccctgatggaggactgcgagaagagcagcgacacttgcaaccccctgtcaggcgccttctcaggagtgtccaacattttcagcttctggggggacagtcggggccgccagtaccaggagctccctcgatgccccgcccccacccccagcctcctcaacatccccctctccagcccgggtcggcggccccggggcgacgtggagagcaggctggatgccctccagcgccagctcaacaggctggagacccggctgagtgcagacatggccactgtcctgcagctgctacagaggcagatgacgctggtcccgcccgcctacagtgctgtgaccaccccggggcctggccccacttccacatccccgctgttgcccgtcagccccctccccaccctcaccttggactcgctttctcaggtttcccagttcatggcgtgtgaggagctgcccccgggggccccagagcttccccaagaaggccccacacgacgcctctccctaccgggccagctgggggccctcacctcccagcccctgcacagacacggctcggacccgggcagttagtggggctgcccagtgtggacacgtggctcacccagggatcaaggcgctgctgggccgctccccttggaggccctgctcaggaggccctgaccgtggaaggggagaggaactcgaaagcacagctcctcccccagcccttgggaccatcttctcctgcagtcccctgggccccagtgagaggggcaggggcagggccggcagtaggtggggcctgtggtccccccactgccctgagggcattagctggtctaactgcccggaggcacccggccctgggccttaggcacctcaaggacttttctgctatttactgctcttattgttaaggataataattaaggatcatatgaataattaatgaagatgctgatgactatgaataataaataattatcctgaggaga

SEQ ID NO: 944 - DNA, 3884 bp, Homo sapiens
  source 1..3884: mol_type = genomic DNA
  misc_feature 1..3884: note = cDNA of KCNH2 gene SNP c.65T>C (p.Phe22Ser)
atgccggtgcggaggggccacgtcgcgccgcagaacaccttcctggacaccatcatccgcaagtctgagggccagagccgtaagttcatcatcgccaacgctcgggtggagaactgcgccgtcatctactgcaacgacggcttctgcgagctgtgcggctactcgcgggccgaggtgatgcagcgaccctgcacctgcgacttcctgcacgggccgcgcacgcagcgccgcgctgccgcgcagatcgcgcaggcactgctgggcgccgaggagcgcaaagtggaaatcgccttctaccggaaagatgggagctgcttcctatgtctggtggatgtggtgcccgtgaagaacgaggatggggctgtcatcatgttcatcctcaatttcgaggtggtgatggagaaggacatggtggggtccccggctcatgacaccaaccaccggggcccccccaccagctggctggccccaggccgcgccaagaccttccgcctgaagctgcccgcgctgctggcgctgacggcccgggagtcgtcggtgcggtcgggcggcgcgggcggcgcgggcgccccgggggccgtggtggtggacgtggacctgacgcccgcggcacccagcagcgagtcgctggccctggacgaagtgacagccatggacaaccacgtggcagggctcgggcccgcggaggagcggcgtgcgctggtgggtcccggctctccgccccgcagcgcgcccggccagctcccatcgccccgggcgcacagcctcaaccccgacgcctcgggctccagctgcagcctggcccggacgcgctcccgagaaagctgcgccagcgtgcgccgcgcctcgtcggccgacgacatcgaggccatgcgcgccggggtgctgcccccgccaccgcgccacgccagcaccggggccatgcacccactgcgcagcggcttgctcaactccacctcggactccgacctcgtgcgctaccgcaccattagcaagattccccaaatcaccctcaactttgtggacctcaagggcgaccccttcttggcttcgcccaccagtgaccgtgagatcatagcacctaagataaaggagcgaacccacaatgtcactgagaaggtcacccaggtcctgtccctgggcgccgacgtgctgcctgagtacaagctgcaggcaccgcgcatccaccgctggaccatcctgcattacagccccttcaaggccgtgtgggactggctcatcctgctgctggtcatctacacggctgtcttcacaccctactcggctgccttcctgctgaaggagacggaagaaggcccgcctgctaccgagtgtggctacgcctgccagccgctggctgtggtggacctcatcgtggacatcatgttcattgtggacatcctcatcaacttccgcaccacctacgtcaatgccaacgaggaggtggtcagccaccccggccgcatcgccgtccactacttcaagggctggttcctcatcgacatggtggccgccatccccttcgacctgctcatcttcggctctggctctgaggagctgatcgggctgctgaagactgcgcggctgctgcggctggtgcgcgtggcgcggaagctggatcgctactcagagtacggcgcggccgtgctgttcttgctcatgtgcacctttgcgctcatcgcgcactggctagcctgcatctggtacgccatcggcaacatggagcagccacacatggactcacgcatcggctggctgcacaacctgggcgaccagataggcaaaccctacaacagcagcggcctgggcggcccctccatcaaggacaagtatgtgacggcgctctacttcaccttcagcagcctcaccagtgtgggcttcggcaacgtctctcccaacaccaactcagagaagatcttctccatctgcgtcatgctcattggctccctcatgtatgctagcatcttcggcaacgtgtcggccatcatccagcggctgtactcgggcacagcccgctaccacacacagatgctgcgggtgcgggagttcatccgcttccaccagatccccaatcccctgcgccagcgcctcgaggagtacttccagcacgcctggtcctacaccaacggcatcgacatgaacgcggtgctgaagggcttccctgagtgcctgcaggctgacatctgcctgcacctgaaccgctcactgctgcagcactgcaaacccttccgaggggccaccaagggctgccttcgggccctggccatgaagttcaagaccacacatgcaccgccaggggacacactggtgcatgctggggacctgctcaccgccctgtacttcatctcccggggctccatcgagatcctgcggggcgacgtcgtcgtggccatcctggggaagaatgacatctttggggagcctctgaacctgtatgcaaggcctggcaagtcgaacggggatgtgcgggccctcacctactgtgacctacacaagatccatcgggacgacctgctggaggtgctggacatgtaccctgagttctccgaccacttctggtccagcctggagatcaccttcaacctgcgagataccaacatgatcccgggctcccccggcagtacggagttagagggtggcttcagtcggcaacgcaagcgcaagttgtccttccgcaggcgcacggacaaggacacggagcagccaggggaggtgtcggccttggggccgggccgggcgggggcagggccgagtagccggggccggccgggggggccgtggggggagagcccgtccagtggcccctccagccctgagagcagtgaggatgagggcccaggccgcagctccagccccctccgcctggtgcccttctccagccccaggccccccggagagccgccgggtggggagcccctgatggaggactgcgagaagagcagcgacacttgcaaccccctgtcaggcgccttctcaggagtgtccaacattttcagcttctggggggacagtcggggccgccagtaccaggagctccctcgatgccccgcccccacccccagcctcctcaacatccccctctccagcccgggtcggcggccccggggcgacgtggagagcaggctggatgccctccagcgccagctcaacaggctggagacccggctgagtgcagacatggccactgtcctgcagctgctacagaggcagatgacgctggtcccgcccgcctacagtgctgtgaccaccccggggcctggccccacttccacatccccgctgttgcccgtcagccccctccccaccctcaccttggactcgctttctcaggtttcccagttcatggcgtgtgaggagctgcccccgggggccccagagcttccccaagaaggccccacacgacgcctctccctaccgggccagctgggggccctcacctcccagcccctgcacagacacggctcggacccgggcagttagtggggctgcccagtgtggacacgtggctcacccagggatcaaggcgctgctgggccgctccccttggaggccctgctcaggaggccctgaccgtggaaggggagaggaactcgaaagcacagctcctcccccagcccttgggaccatcttctcctgcagtcccctgggccccagtgagaggggcaggggcagggccggcagtaggtggggcctgtggtccccccactgccctgagggcattagctggtctaactgcccggaggcacccggccctgggccttaggcacctcaaggacttttctgctatttactgctcttattgttaaggataataattaaggatcatatgaataattaatgaagatgctgatgactatgaataataaataattatcctgaggaga

SEQ ID NO: 945 - DNA, 3884 bp, Homo sapiens
  source 1..3884: mol_type = genomic DNA
  misc_feature 1..3884: note = cDNA of KCNH2 gene SNP c.663C>G (p.His221Gln)
atgccggtgcggaggggccacgtcgcgccgcagaacaccttcctggacaccatcatccgcaagtttgagggccagagccgtaagttcatcatcgccaacgctcgggtggagaactgcgccgtcatctactgcaacgacggcttctgcgagctgtgcggctactcgcgggccgaggtgatgcagcgaccctgcacctgcgacttcctgcacgggccgcgcacgcagcgccgcgctgccgcgcagatcgcgcaggcactgctgggcgccgaggagcgcaaagtggaaatcgccttctaccggaaagatgggagctgcttcctatgtctggtggatgtggtgcccgtgaagaacgaggatggggctgtcatcatgttcatcctcaatttcgaggtggtgatggagaaggacatggtggggtccccggctcatgacaccaaccaccggggcccccccaccagctggctggccccaggccgcgccaagaccttccgcctgaagctgcccgcgctgctggcgctgacggcccgggagtcgtcggtgcggtcgggcggcgcgggcggcgcgggcgccccgggggccgtggtggtggacgtggacctgacgcccgcggcacccagcagcgagtcgctggccctggacgaagtgacagccatggacaaccaggtggcagggctcgggcccgcggaggagcggcgtgcgctggtgggtcccggctctccgccccgcagcgcgcccggccagctcccatcgccccgggcgcacagcctcaaccccgacgcctcgggctccagctgcagcctggcccggacgcgctcccgagaaagctgcgccagcgtgcgccgcgcctcgtcggccgacgacatcgaggccatgcgcgccggggtgctgcccccgccaccgcgccacgccagcaccggggccatgcacccactgcgcagcggcttgctcaactccacctcggactccgacctcgtgcgctaccgcaccattagcaagattccccaaatcaccctcaactttgtggacctcaagggcgaccccttcttggcttcgcccaccagtgaccgtgagatcatagcacctaagataaaggagcgaacccacaatgtcactgagaaggtcacccaggtcctgtccctgggcgccgacgtgctgcctgagtacaagctgcaggcaccgcgcatccaccgctggaccatcctgcattacagccccttcaaggccgtgtgggactggctcatcctgctgctggtcatctacacggctgtcttcacaccctactcggctgccttcctgctgaaggagacggaagaaggcccgcctgctaccgagtgtggctacgcctgccagccgctggctgtggtggacctcatcgtggacatcatgttcattgtggacatcctcatcaacttccgcaccacctacgtcaatgccaacgaggaggtggtcagccaccccggccgcatcgccgtccactacttcaagggctggttcctcatcgacatggtggccgccatccccttcgacctgctcatcttcggctctggctctgaggagctgatcgggctgctgaagactgcgcggctgctgcggctggtgcgcgtggcgcggaagctggatcgctactcagagtacggcgcggccgtgctgttcttgctcatgtgcacctttgcgctcatcgcgcactggctagcctgcatctggtacgccatcggcaacatggagcagccacacatggactcacgcatcggctggctgcacaacctgggcgaccagataggcaaaccctacaacagcagcggcctgggcggcccctccatcaaggacaagtatgtgacggcgctctacttcaccttcagcagcctcaccagtgtgggcttcggcaacgtctctcccaacaccaactcagagaagatcttctccatctgcgtcatgctcattggctccctcatgtatgctagcatcttcggcaacgtgtcggccatcatccagcggctgtactcgggcacagcccgctaccacacacagatgctgcgggtgcgggagttcatccgcttccaccagatccccaatcccctgcgccagcgcctcgaggagtacttccagcacgcctggtcctacaccaacggcatcgacatgaacgcggtgctgaagggcttccctgagtgcctgcaggctgacatctgcctgcacctgaaccgctcactgctgcagcactgcaaacccttccgaggggccaccaagggctgccttcgggccctggccatgaagttcaagaccacacatgcaccgccaggggacacactggtgcatgctggggacctgctcaccgccctgtacttcatctcccggggctccatcgagatcctgcggggcgacgtcgtcgtggccatcctggggaagaatgacatctttggggagcctctgaacctgtatgcaaggcctggcaagtcgaacggggatgtgcgggccctcacctactgtgacctacacaagatccatcgggacgacctgctggaggtgctggacatgtaccctgagttctccgaccacttctggtccagcctggagatcaccttcaacctgcgagataccaacatgatcccgggctcccccggcagtacggagttagagggtggcttcagtcggcaacgcaagcgcaagttgtccttccgcaggcgcacggacaaggacacggagcagccaggggaggtgtcggccttggggccgggccgggcgggggcagggccgagtagccggggccggccgggggggccgtggggggagagcccgtccagtggcccctccagccctgagagcagtgaggatgagggcccaggccgcagctccagccccctccgcctggtgcccttctccagccccaggccccccggagagccgccgggtggggagcccctgatggaggactgcgagaagagcagcgacacttgcaaccccctgtcaggcgccttctcaggagtgtccaacattttcagcttctggggggacagtcggggccgccagtaccaggagctccctcgatgccccgcccccacccccagcctcctcaacatccccctctccagcccgggtcggcggccccggggcgacgtggagagcaggctggatgccctccagcgccagctcaacaggctggagacccggctgagtgcagacatggccactgtcctgcagctgctacagaggcagatgacgctggtcccgcccgcctacagtgctgtgaccaccccggggcctggccccacttccacatccccgctgttgcccgtcagccccctccccaccctcaccttggactcgctttctcaggtttcccagttcatggcgtgtgaggagctgcccccgggggccccagagcttccccaagaaggccccacacgacgcctctccctaccgggccagctgggggccctcacctcccagcccctgcacagacacggctcggacccgggcagttagtggggctgcccagtgtggacacgtggctcacccagggatcaaggcgctgctgggccgctccccttggaggccctgctcaggaggccctgaccgtggaaggggagaggaactcgaaagcacagctcctcccccagcccttgggaccatcttctcctgcagtcccctgggccccagtgagaggggcaggggcagggccggcagtaggtggggcctgtggtccccccactgccctgagggcattagctggtctaactgcccggaggcacccggccctgggccttaggcacctcaaggacttttctgctatttactgctcttattgttaaggataataattaaggatcatatgaataattaatgaagatgctgatgactatgaataataaataattatcctgaggaga

SEQ ID NO: 946 - DNA, 3884 bp, Homo sapiens
  source 1..3884: mol_type = genomic DNA
  misc_feature 1..3884: note = cDNA of KCNH2 gene SNP c.664G>A (p.Val222Met)
atgccggtgcggaggggccacgtcgcgccgcagaacaccttcctggacaccatcatccgcaagtttgagggccagagccgtaagttcatcatcgccaacgctcgggtggagaactgcgccgtcatctactgcaacgacggcttctgcgagctgtgcggctactcgcgggccgaggtgatgcagcgaccctgcacctgcgacttcctgcacgggccgcgcacgcagcgccgcgctgccgcgcagatcgcgcaggcactgctgggcgccgaggagcgcaaagtggaaatcgccttctaccggaaagatgggagctgcttcctatgtctggtggatgtggtgcccgtgaagaacgaggatggggctgtcatcatgttcatcctcaatttcgaggtggtgatggagaaggacatggtggggtccccggctcatgacaccaaccaccggggcccccccaccagctggctggccccaggccgcgccaagaccttccgcctgaagctgcccgcgctgctggcgctgacggcccgggagtcgtcggtgcggtcgggcggcgcgggcggcgcgggcgccccgggggccgtggtggtggacgtggacctgacgcccgcggcacccagcagcgagtcgctggccctggacgaagtgacagccatggacaaccacatggcagggctcgggcccgcggaggagcggcgtgcgctggtgggtcccggctctccgccccgcagcgcgcccggccagctcccatcgccccgggcgcacagcctcaaccccgacgcctcgggctccagctgcagcctggcccggacgcgctcccgagaaagctgcgccagcgtgcgccgcgcctcgtcggccgacgacatcgaggccatgcgcgccggggtgctgcccccgccaccgcgccacgccagcaccggggccatgcacccactgcgcagcggcttgctcaactccacctcggactccgacctcgtgcgctaccgcaccattagcaagattccccaaatcaccctcaactttgtggacctcaagggcgaccccttcttggcttcgcccaccagtgaccgtgagatcatagcacctaagataaaggagcgaacccacaatgtcactgagaaggtcacccaggtcctgtccctgggcgccgacgtgctgcctgagtacaagctgcaggcaccgcgcatccaccgctggaccatcctgcattacagccccttcaaggccgtgtgggactggctcatcctgctgctggtcatctacacggctgtcttcacaccctactcggctgccttcctgctgaaggagacggaagaaggcccgcctgctaccgagtgtggctacgcctgccagccgctggctgtggtggacctcatcgtggacatcatgttcattgtggacatcctcatcaacttccgcaccacctacgtcaatgccaacgaggaggtggtcagccaccccggccgcatcgccgtccactacttcaagggctggttcctcatcgacatggtggccgccatccccttcgacctgctcatcttcggctctggctctgaggagctgatcgggctgctgaagactgcgcggctgctgcggctggtgcgcgtggcgcggaagctggatcgctactcagagtacggcgcggccgtgctgttcttgctcatgtgcacctttgcgctcatcgcgcactggctagcctgcatctggtacgccatcggcaacatggagcagccacacatggactcacgcatcggctggctgcacaacctgggcgaccagataggcaaaccctacaacagcagcggcctgggcggcccctccatcaaggacaagtatgtgacggcgctctacttcaccttcagcagcctcaccagtgtgggcttcggcaacgtctctcccaacaccaactcagagaagatcttctccatctgcgtcatgctcattggctccctcatgtatgctagcatcttcggcaacgtgtcggccatcatccagcggctgtactcgggcacagcccgctaccacacacagatgctgcgggtgcgggagttcatccgcttccaccagatccccaatcccctgcgccagcgcctcgaggagtacttccagcacgcctggtcctacaccaacggcatcgacatgaacgcggtgctgaagggcttccctgagtgcctgcaggctgacatctgcctgcacctgaaccgctcactgctgcagcactgcaaacccttccgaggggccaccaagggctgccttcgggccctggccatgaagttcaagaccacacatgcaccgccaggggacacactggtgcatgctggggacctgctcaccgccctgtacttcatctcccggggctccatcgagatcctgcggggcgacgtcgtcgtggccatcctggggaagaatgacatctttggggagcctctgaacctgtatgcaaggcctggcaagtcgaacggggatgtgcgggccctcacctactgtgacctacacaagatccatcgggacgacctgctggaggtgctggacatgtaccctgagttctccgaccacttctggtccagcctggagatcaccttcaacctgcgagataccaacatgatcccgggctcccccggcagtacggagttagagggtggcttcagtcggcaacgcaagcgcaagttgtccttccgcaggcgcacggacaaggacacggagcagccaggggaggtgtcggccttggggccgggccgggcgggggcagggccgagtagccggggccggccgggggggccgtggggggagagcccgtccagtggcccctccagccctgagagcagtgaggatgagggcccaggccgcagctccagccccctccgcctggtgcccttctccagccccaggccccccggagagccgccgggtggggagcccctgatggaggactgcgagaagagcagcgacacttgcaaccccctgtcaggcgccttctcaggagtgtccaacattttcagcttctggggggacagtcggggccgccagtaccaggagctccctcgatgccccgcccccacccccagcctcctcaacatccccctctccagcccgggtcggcggccccggggcgacgtggagagcaggctggatgccctccagcgccagctcaacaggctggagacccggctgagtgcagacatggccactgtcctgcagctgctacagaggcagatgacgctggtcccgcccgcctacagtgctgtgaccaccccggggcctggccccacttccacatccccgctgttgcccgtcagccccctccccaccctcaccttggactcgctttctcaggtttcccagttcatggcgtgtgaggagctgcccccgggggccccagagcttccccaagaaggccccacacgacgcctctccctaccgggccagctgggggccctcacctcccagcccctgcacagacacggctcggacccgggcagttagtggggctgcccagtgtggacacgtggctcacccagggatcaaggcgctgctgggccgctccccttggaggccctgctcaggaggccctgaccgtggaaggggagaggaactcgaaagcacagctcctcccccagcccttgggaccatcttctcctgcagtcccctgggccccagtgagaggggcaggggcagggccggcagtaggtggggcctgtggtccccccactgccctgagggcattagctggtctaactgcccggaggcacccggccctgggccttaggcacctcaaggacttttctgctatttactgctcttattgttaaggataataattaaggatcatatgaataattaatgaagatgctgatgactatgaataataaataattatcctgaggaga

SEQ ID NO: 947 - DNA, 3884 bp, Homo sapiens
  source 1..3884: mol_type = genomic DNA
  misc_feature 1..3884: note = cDNA of KCNH2 gene SNP c.670G>A (p.Gly224Arg)
atgccggtgcggaggggccacgtcgcgccgcagaacaccttcctggacaccatcatccgcaagtttgagggccagagccgtaagttcatcatcgccaacgctcgggtggagaactgcgccgtcatctactgcaacgacggcttctgcgagctgtgcggctactcgcgggccgaggtgatgcagcgaccctgcacctgcgacttcctgcacgggccgcgcacgcagcgccgcgctgccgcgcagatcgcgcaggcactgctgggcgccgaggagcgcaaagtggaaatcgccttctaccggaaagatgggagctgcttcctatgtctggtggatgtggtgcccgtgaagaacgaggatggggctgtcatcatgttcatcctcaatttcgaggtggtgatggagaaggacatggtggggtccccggctcatgacaccaaccaccggggcccccccaccagctggctggccccaggccgcgccaagaccttccgcctgaagctgcccgcgctgctggcgctgacggcccgggagtcgtcggtgcggtcgggcggcgcgggcggcgcgggcgccccgggggccgtggtggtggacgtggacctgacgcccgcggcacccagcagcgagtcgctggccctggacgaagtgacagccatggacaaccacgtggcaaggctcgggcccgcggaggagcggcgtgcgctggtgggtcccggctctccgccccgcagcgcgcccggccagctcccatcgccccgggcgcacagcctcaaccccgacgcctcgggctccagctgcagcctggcccggacgcgctcccgagaaagctgcgccagcgtgcgccgcgcctcgtcggccgacgacatcgaggccatgcgcgccggggtgctgcccccgccaccgcgccacgccagcaccggggccatgcacccactgcgcagcggcttgctcaactccacctcggactccgacctcgtgcgctaccgcaccattagcaagattccccaaatcaccctcaactttgtggacctcaagggcgaccccttcttggcttcgcccaccagtgaccgtgagatcatagcacctaagataaaggagcgaacccacaatgtcactgagaaggtcacccaggtcctgtccctgggcgccgacgtgctgcctgagtacaagctgcaggcaccgcgcatccaccgctggaccatcctgcattacagccccttcaaggccgtgtgggactggctcatcctgctgctggtcatctacacggctgtcttcacaccctactcggctgccttcctgctgaaggagacggaagaaggcccgcctgctaccgagtgtggctacgcctgccagccgctggctgtggtggacctcatcgtggacatcatgttcattgtggacatcctcatcaacttccgcaccacctacgtcaatgccaacgaggaggtggtcagccaccccggccgcatcgccgtccactacttcaagggctggttcctcatcgacatggtggccgccatccccttcgacctgctcatcttcggctctggctctgaggagctgatcgggctgctgaagactgcgcggctgctgcggctggtgcgcgtggcgcggaagctggatcgctactcagagtacggcgcggccgtgctgttcttgctcatgtgcacctttgcgctcatcgcgcactggctagcctgcatctggtacgccatcggcaacatggagcagccacacatggactcacgcatcggctggctgcacaacctgggcgaccagataggcaaaccctacaacagcagcggcctgggcggcccctccatcaaggacaagtatgtgacggcgctctacttcaccttcagcagcctcaccagtgtgggcttcggcaacgtctctcccaacaccaactcagagaagatcttctccatctgcgtcatgctcattggctccctcatgtatgctagcatcttcggcaacgtgtcggccatcatccagcggctgtactcgggcacagcccgctaccacacacagatgctgcgggtgcgggagttcatccgcttccaccagatccccaatcccctgcgccagcgcctcgaggagtacttccagcacgcctggtcctacaccaacggcatcgacatgaacgcggtgctgaagggcttccctgagtgcctgcaggctgacatctgcctgcacctgaaccgctcactgctgcagcactgcaaacccttccgaggggccaccaagggctgccttcgggccctggccatgaagttcaagaccacacatgcaccgccaggggacacactggtgcatgctggggacctgctcaccgccctgtacttcatctcccggggctccatcgagatcctgcggggcgacgtcgtcgtggccatcctggggaagaatgacatctttggggagcctctgaacctgtatgcaaggcctggcaagtcgaacggggatgtgcgggccctcacctactgtgacctacacaagatccatcgggacgacctgctggaggtgctggacatgtaccctgagttctccgaccacttctggtccagcctggagatcaccttcaacctgcgagataccaacatgatcccgggctcccccggcagtacggagttagagggtggcttcagtcggcaacgcaagcgcaagttgtccttccgcaggcgcacggacaaggacacggagcagccaggggaggtgtcggccttggggccgggccgggcgggggcagggccgagtagccggggccggccgggggggccgtggggggagagcccgtccagtggcccctccagccctgagagcagtgaggatgagggcccaggccgcagctccagccccctccgcctggtgcccttctccagccccaggccccccggagagccgccgggtggggagcccctgatggaggactgcgagaagagcagcgacacttgcaaccccctgtcaggcgccttctcaggagtgtccaacattttcagcttctggggggacagtcggggccgccagtaccaggagctccctcgatgccccgcccccacccccagcctcctcaacatccccctctccagcccgggtcggcggccccggggcgacgtggagagcaggctggatgccctccagcgccagctcaacaggctggagacccggctgagtgcagacatggccactgtcctgcagctgctacagaggcagatgacgctggtcccgcccgcctacagtgctgtgaccaccccggggcctggccccacttccacatccccgctgttgcccgtcagccccctccccaccctcaccttggactcgctttctcaggtttcccagttcatggcgtgtgaggagctgcccccgggggccccagagcttccccaagaaggccccacacgacgcctctccctaccgggccagctgggggccctcacctcccagcccctgcacagacacggctcggacccgggcagttagtggggctgcccagtgtggacacgtggctcacccagggatcaaggcgctgctgggccgctccccttggaggccctgctcaggaggccctgaccgtggaaggggagaggaactcgaaagcacagctcctcccccagcccttgggaccatcttctcctgcagtcccctgggccccagtgagaggggcaggggcagggccggcagtaggtggggcctgtggtccccccactgccctgagggcattagctggtctaactgcccggaggcacccggccctgggccttaggcacctcaaggacttttctgctatttactgctcttattgttaaggataataattaaggatcatatgaataattaatgaagatgctgatgactatgaataataaataattatcctgaggaga

SEQ ID NO: 948 - DNA, 3884 bp, Homo sapiens
  source 1..3884: mol_type = genomic DNA
  misc_feature 1..3884: note = cDNA of KCNH2 gene SNP c.682G>C (p.Ala228Pro)
atgccggtgcggaggggccacgtcgcgccgcagaacaccttcctggacaccatcatccgcaagtttgagggccagagccgtaagttcatcatcgccaacgctcgggtggagaactgcgccgtcatctactgcaacgacggcttctgcgagctgtgcggctactcgcgggccgaggtgatgcagcgaccctgcacctgcgacttcctgcacgggccgcgcacgcagcgccgcgctgccgcgcagatcgcgcaggcactgctgggcgccgaggagcgcaaagtggaaatcgccttctaccggaaagatgggagctgcttcctatgtctggtggatgtggtgcccgtgaagaacgaggatggggctgtcatcatgttcatcctcaatttcgaggtggtgatggagaaggacatggtggggtccccggctcatgacaccaaccaccggggcccccccaccagctggctggccccaggccgcgccaagaccttccgcctgaagctgcccgcgctgctggcgctgacggcccgggagtcgtcggtgcggtcgggcggcgcgggcggcgcgggcgccccgggggccgtggtggtggacgtggacctgacgcccgcggcacccagcagcgagtcgctggccctggacgaagtgacagccatggacaaccacgtggcagggctcgggcccccggaggagcggcgtgcgctggtgggtcccggctctccgccccgcagcgcgcccggccagctcccatcgccccgggcgcacagcctcaaccccgacgcctcgggctccagctgcagcctggcccggacgcgctcccgagaaagctgcgccagcgtgcgccgcgcctcgtcggccgacgacatcgaggccatgcgcgccggggtgctgcccccgccaccgcgccacgccagcaccggggccatgcacccactgcgcagcggcttgctcaactccacctcggactccgacctcgtgcgctaccgcaccattagcaagattccccaaatcaccctcaactttgtggacctcaagggcgaccccttcttggcttcgcccaccagtgaccgtgagatcatagcacctaagataaaggagcgaacccacaatgtcactgagaaggtcacccaggtcctgtccctgggcgccgacgtgctgcctgagtacaagctgcaggcaccgcgcatccaccgctggaccatcctgcattacagccccttcaaggccgtgtgggactggctcatcctgctgctggtcatctacacggctgtcttcacaccctactcggctgccttcctgctgaaggagacggaagaaggcccgcctgctaccgagtgtggctacgcctgccagccgctggctgtggtggacctcatcgtggacatcatgttcattgtggacatcctcatcaacttccgcaccacctacgtcaatgccaacgaggaggtggtcagccaccccggccgcatcgccgtccactacttcaagggctggttcctcatcgacatggtggccgccatccccttcgacctgctcatcttcggctctggctctgaggagctgatcgggctgctgaagactgcgcggctgctgcggctggtgcgcgtggcgcggaagctggatcgctactcagagtacggcgcggccgtgctgttcttgctcatgtgcacctttgcgctcatcgcgcactggctagcctgcatctggtacgccatcggcaacatggagcagccacacatggactcacgcatcggctggctgcacaacctgggcgaccagataggcaaaccctacaacagcagcggcctgggcggcccctccatcaaggacaagtatgtgacggcgctctacttcaccttcagcagcctcaccagtgtgggcttcggcaacgtctctcccaacaccaactcagagaagatcttctccatctgcgtcatgctcattggctccctcatgtatgctagcatcttcggcaacgtgtcggccatcatccagcggctgtactcgggcacagcccgctaccacacacagatgctgcgggtgcgggagttcatccgcttccaccagatccccaatcccctgcgccagcgcctcgaggagtacttccagcacgcctggtcctacaccaacggcatcgacatgaacgcggtgctgaagggcttccctgagtgcctgcaggctgacatctgcctgcacctgaaccgctcactgctgcagcactgcaaacccttccgaggggccaccaagggctgccttcgggccctggccatgaagttcaagaccacacatgcaccgccaggggacacactggtgcatgctggggacctgctcaccgccctgtacttcatctcccggggctccatcgagatcctgcggggcgacgtcgtcgtggccatcctggggaagaatgacatctttggggagcctctgaacctgtatgcaaggcctggcaagtcgaacggggatgtgcgggccctcacctactgtgacctacacaagatccatcgggacgacctgctggaggtgctggacatgtaccctgagttctccgaccacttctggtccagcctggagatcaccttcaacctgcgagataccaacatgatcccgggctcccccggcagtacggagttagagggtggcttcagtcggcaacgcaagcgcaagttgtccttccgcaggcgcacggacaaggacacggagcagccaggggaggtgtcggccttggggccgggccgggcgggggcagggccgagtagccggggccggccgggggggccgtggggggagagcccgtccagtggcccctccagccctgagagcagtgaggatgagggcccaggccgcagctccagccccctccgcctggtgcccttctccagccccaggccccccggagagccgccgggtggggagcccctgatggaggactgcgagaagagcagcgacacttgcaaccccctgtcaggcgccttctcaggagtgtccaacattttcagcttctggggggacagtcggggccgccagtaccaggagctccctcgatgccccgcccccacccccagcctcctcaacatccccctctccagcccgggtcggcggccccggggcgacgtggagagcaggctggatgccctccagcgccagctcaacaggctggagacccggctgagtgcagacatggccactgtcctgcagctgctacagaggcagatgacgctggtcccgcccgcctacagtgctgtgaccaccccggggcctggccccacttccacatccccgctgttgcccgtcagccccctccccaccctcaccttggactcgctttctcaggtttcccagttcatggcgtgtgaggagctgcccccgggggccccagagcttccccaagaaggccccacacgacgcctctccctaccgggccagctgggggccctcacctcccagcccctgcacagacacggctcggacccgggcagttagtggggctgcccagtgtggacacgtggctcacccagggatcaaggcgctgctgggccgctccccttggaggccctgctcaggaggccctgaccgtggaaggggagaggaactcgaaagcacagctcctcccccagcccttgggaccatcttctcctgcagtcccctgggccccagtgagaggggcaggggcagggccggcagtaggtggggcctgtggtccccccactgccctgagggcattagctggtctaactgcccggaggcacccggccctgggccttaggcacctcaaggacttttctgctatttactgctcttattgttaaggataataattaaggatcatatgaataattaatgaagatgctgatgactatgaataataaataattatcctgaggaga

SEQ ID NO: 949 - DNA, 3884 bp, Homo sapiens
  source 1..3884: mol_type = genomic DNA
  misc_feature 1..3884: note = cDNA of KCNH2 gene SNP c.683C>T (p.Ala228Val)
atgccggtgcggaggggccacgtcgcgccgcagaacaccttcctggacaccatcatccgcaagtttgagggccagagccgtaagttcatcatcgccaacgctcgggtggagaactgcgccgtcatctactgcaacgacggcttctgcgagctgtgcggctactcgcgggccgaggtgatgcagcgaccctgcacctgcgacttcctgcacgggccgcgcacgcagcgccgcgctgccgcgcagatcgcgcaggcactgctgggcgccgaggagcgcaaagtggaaatcgccttctaccggaaagatgggagctgcttcctatgtctggtggatgtggtgcccgtgaagaacgaggatggggctgtcatcatgttcatcctcaatttcgaggtggtgatggagaaggacatggtggggtccccggctcatgacaccaaccaccggggcccccccaccagctggctggccccaggccgcgccaagaccttccgcctgaagctgcccgcgctgctggcgctgacggcccgggagtcgtcggtgcggtcgggcggcgcgggcggcgcgggcgccccgggggccgtggtggtggacgtggacctgacgcccgcggcacccagcagcgagtcgctggccctggacgaagtgacagccatggacaaccacgtggcagggctcgggcccgtggaggagcggcgtgcgctggtgggtcccggctctccgccccgcagcgcgcccggccagctcccatcgccccgggcgcacagcctcaaccccgacgcctcgggctccagctgcagcctggcccggacgcgctcccgagaaagctgcgccagcgtgcgccgcgcctcgtcggccgacgacatcgaggccatgcgcgccggggtgctgcccccgccaccgcgccacgccagcaccggggccatgcacccactgcgcagcggcttgctcaactccacctcggactccgacctcgtgcgctaccgcaccattagcaagattccccaaatcaccctcaactttgtggacctcaagggcgaccccttcttggcttcgcccaccagtgaccgtgagatcatagcacctaagataaaggagcgaacccacaatgtcactgagaaggtcacccaggtcctgtccctgggcgccgacgtgctgcctgagtacaagctgcaggcaccgcgcatccaccgctggaccatcctgcattacagccccttcaaggccgtgtgggactggctcatcctgctgctggtcatctacacggctgtcttcacaccctactcggctgccttcctgctgaaggagacggaagaaggcccgcctgctaccgagtgtggctacgcctgccagccgctggctgtggtggacctcatcgtggacatcatgttcattgtggacatcctcatcaacttccgcaccacctacgtcaatgccaacgaggaggtggtcagccaccccggccgcatcgccgtccactacttcaagggctggttcctcatcgacatggtggccgccatccccttcgacctgctcatcttcggctctggctctgaggagctgatcgggctgctgaagactgcgcggctgctgcggctggtgcgcgtggcgcggaagctggatcgctactcagagtacggcgcggccgtgctgttcttgctcatgtgcacctttgcgctcatcgcgcactggctagcctgcatctggtacgccatcggcaacatggagcagccacacatggactcacgcatcggctggctgcacaacctgggcgaccagataggcaaaccctacaacagcagcggcctgggcggcccctccatcaaggacaagtatgtgacggcgctctacttcaccttcagcagcctcaccagtgtgggcttcggcaacgtctctcccaacaccaactcagagaagatcttctccatctgcgtcatgctcattggctccctcatgtatgctagcatcttcggcaacgtgtcggccatcatccagcggctgtactcgggcacagcccgctaccacacacagatgctgcgggtgcgggagttcatccgcttccaccagatccccaatcccctgcgccagcgcctcgaggagtacttccagcacgcctggtcctacaccaacggcatcgacatgaacgcggtgctgaagggcttccctgagtgcctgcaggctgacatctgcctgcacctgaaccgctcactgctgcagcactgcaaacccttccgaggggccaccaagggctgccttcgggccctggccatgaagttcaagaccacacatgcaccgccaggggacacactggtgcatgctggggacctgctcaccgccctgtacttcatctcccggggctccatcgagatcctgcggggcgacgtcgtcgtggccatcctggggaagaatgacatctttggggagcctctgaacctgtatgcaaggcctggcaagtcgaacggggatgtgcgggccctcacctactgtgacctacacaagatccatcgggacgacctgctggaggtgctggacatgtaccctgagttctccgaccacttctggtccagcctggagatcaccttcaacctgcgagataccaacatgatcccgggctcccccggcagtacggagttagagggtggcttcagtcggcaacgcaagcgcaagttgtccttccgcaggcgcacggacaaggacacggagcagccaggggaggtgtcggccttggggccgggccgggcgggggcagggccgagtagccggggccggccgggggggccgtggggggagagcccgtccagtggcccctccagccctgagagcagtgaggatgagggcccaggccgcagctccagccccctccgcctggtgcccttctccagccccaggccccccggagagccgccgggtggggagcccctgatggaggactgcgagaagagcagcgacacttgcaaccccctgtcaggcgccttctcaggagtgtccaacattttcagcttctggggggacagtcggggccgccagtaccaggagctccctcgatgccccgcccccacccccagcctcctcaacatccccctctccagcccgggtcggcggccccggggcgacgtggagagcaggctggatgccctccagcgccagctcaacaggctggagacccggctgagtgcagacatggccactgtcctgcagctgctacagaggcagatgacgctggtcccgcccgcctacagtgctgtgaccaccccggggcctggccccacttccacatccccgctgttgcccgtcagccccctccccaccctcaccttggactcgctttctcaggtttcccagttcatggcgtgtgaggagctgcccccgggggccccagagcttccccaagaaggccccacacgacgcctctccctaccgggccagctgggggccctcacctcccagcccctgcacagacacggctcggacccgggcagttagtggggctgcccagtgtggacacgtggctcacccagggatcaaggcgctgctgggccgctccccttggaggccctgctcaggaggccctgaccgtggaaggggagaggaactcgaaagcacagctcctcccccagcccttgggaccatcttctcctgcagtcccctgggccccagtgagaggggcaggggcagggccggcagtaggtggggcctgtggtccccccactgccctgagggcattagctggtctaactgcccggaggcacccggccctgggccttaggcacctcaaggacttttctgctatttactgctcttattgttaaggataataattaaggatcatatgaataattaatgaagatgctgatgactatgaataataaataattatcctgaggaga

SEQ ID NO: 950 - DNA, 3884 bp, Homo sapiens
  source 1..3884: mol_type = genomic DNA
  misc_feature 1..3884: note = cDNA of KCNH2 gene SNP c.685G>T (p.Glu229Ter)
atgccggtgcggaggggccacgtcgcgccgcagaacaccttcctggacaccatcatccgcaagtttgagggccagagccgtaagttcatcatcgccaacgctcgggtggagaactgcgccgtcatctactgcaacgacggcttctgcgagctgtgcggctactcgcgggccgaggtgatgcagcgaccctgcacctgcgacttcctgcacgggccgcgcacgcagcgccgcgctgccgcgcagatcgcgcaggcactgctgggcgccgaggagcgcaaagtggaaatcgccttctaccggaaagatgggagctgcttcctatgtctggtggatgtggtgcccgtgaagaacgaggatggggctgtcatcatgttcatcctcaatttcgaggtggtgatggagaaggacatggtggggtccccggctcatgacaccaaccaccggggcccccccaccagctggctggccccaggccgcgccaagaccttccgcctgaagctgcccgcgctgctggcgctgacggcccgggagtcgtcggtgcggtcgggcggcgcgggcggcgcgggcgccccgggggccgtggtggtggacgtggacctgacgcccgcggcacccagcagcgagtcgctggccctggacgaagtgacagccatggacaaccacgtggcagggctcgggcccgcgtaggagcggcgtgcgctggtgggtcccggctctccgccccgcagcgcgcccggccagctcccatcgccccgggcgcacagcctcaaccccgacgcctcgggctccagctgcagcctggcccggacgcgctcccgagaaagctgcgccagcgtgcgccgcgcctcgtcggccgacgacatcgaggccatgcgcgccggggtgctgcccccgccaccgcgccacgccagcaccggggccatgcacccactgcgcagcggcttgctcaactccacctcggactccgacctcgtgcgctaccgcaccattagcaagattccccaaatcaccctcaactttgtggacctcaagggcgaccccttcttggcttcgcccaccagtgaccgtgagatcatagcacctaagataaaggagcgaacccacaatgtcactgagaaggtcacccaggtcctgtccctgggcgccgacgtgctgcctgagtacaagctgcaggcaccgcgcatccaccgctggaccatcctgcattacagccccttcaaggccgtgtgggactggctcatcctgctgctggtcatctacacggctgtcttcacaccctactcggctgccttcctgctgaaggagacggaagaaggcccgcctgctaccgagtgtggctacgcctgccagccgctggctgtggtggacctcatcgtggacatcatgttcattgtggacatcctcatcaacttccgcaccacctacgtcaatgccaacgaggaggtggtcagccaccccggccgcatcgccgtccactacttcaagggctggttcctcatcgacatggtggccgccatccccttcgacctgctcatcttcggctctggctctgaggagctgatcgggctgctgaagactgcgcggctgctgcggctggtgcgcgtggcgcggaagctggatcgctactcagagtacggcgcggccgtgctgttcttgctcatgtgcacctttgcgctcatcgcgcactggctagcctgcatctggtacgccatcggcaacatggagcagccacacatggactcacgcatcggctggctgcacaacctgggcgaccagataggcaaaccctacaacagcagcggcctgggcggcccctccatcaaggacaagtatgtgacggcgctctacttcaccttcagcagcctcaccagtgtgggcttcggcaacgtctctcccaacaccaactcagagaagatcttctccatctgcgtcatgctcattggctccctcatgtatgctagcatcttcggcaacgtgtcggccatcatccagcggctgtactcgggcacagcccgctaccacacacagatgctgcgggtgcgggagttcatccgcttccaccagatccccaatcccctgcgccagcgcctcgaggagtacttccagcacgcctggtcctacaccaacggcatcgacatgaacgcggtgctgaagggcttccctgagtgcctgcaggctgacatctgcctgcacctgaaccgctcactgctgcagcactgcaaacccttccgaggggccaccaagggctgccttcgggccctggccatgaagttcaagaccacacatgcaccgccaggggacacactggtgcatgctggggacctgctcaccgccctgtacttcatctcccggggctccatcgagatcctgcggggcgacgtcgtcgtggccatcctggggaagaatgacatctttggggagcctctgaacctgtatgcaaggcctggcaagtcgaacggggatgtgcgggccctcacctactgtgacctacacaagatccatcgggacgacctgctggaggtgctggacatgtaccctgagttctccgaccacttctggtccagcctggagatcaccttcaacctgcgagataccaacatgatcccgggctcccccggcagtacggagttagagggtggcttcagtcggcaacgcaagcgcaagttgtccttccgcaggcgcacggacaaggacacggagcagccaggggaggtgtcggccttggggccgggccgggcgggggcagggccgagtagccggggccggccgggggggccgtggggggagagcccgtccagtggcccctccagccctgagagcagtgaggatgagggcccaggccgcagctccagccccctccgcctggtgcccttctccagccccaggccccccggagagccgccgggtggggagcccctgatggaggactgcgagaagagcagcgacacttgcaaccccctgtcaggcgccttctcaggagtgtccaacattttcagcttctggggggacagtcggggccgccagtaccaggagctccctcgatgccccgcccccacccccagcctcctcaacatccccctctccagcccgggtcggcggccccggggcgacgtggagagcaggctggatgccctccagcgccagctcaacaggctggagacccggctgagtgcagacatggccactgtcctgcagctgctacagaggcagatgacgctggtcccgcccgcctacagtgctgtgaccaccccggggcctggccccacttccacatccccgctgttgcccgtcagccccctccccaccctcaccttggactcgctttctcaggtttcccagttcatggcgtgtgaggagctgcccccgggggccccagagcttccccaagaaggccccacacgacgcctctccctaccgggccagctgggggccctcacctcccagcccctgcacagacacggctcggacccgggcagttagtggggctgcccagtgtggacacgtggctcacccagggatcaaggcgctgctgggccgctccccttggaggccctgctcaggaggccctgaccgtggaaggggagaggaactcgaaagcacagctcctcccccagcccttgggaccatcttctcctgcagtcccctgggccccagtgagaggggcaggggcagggccggcagtaggtggggcctgtggtccccccactgccctgagggcattagctggtctaactgcccggaggcacccggccctgggccttaggcacctcaaggacttttctgctatttactgctcttattgttaaggataataattaaggatcatatgaataattaatgaagatgctgatgactatgaataataaataattatcctgaggaga

SEQ ID NO: 951 - DNA, 3884 bp, Homo sapiens
  source 1..3884: mol_type = genomic DNA
  misc_feature 1..3884: note = cDNA of KCNH2 gene SNP c.692G>A (p.Arg231Gln)
atgccggtgcggaggggccacgtcgcgccgcagaacaccttcctggacaccatcatccgcaagtttgagggccagagccgtaagttcatcatcgccaacgctcgggtggagaactgcgccgtcatctactgcaacgacggcttctgcgagctgtgcggctactcgcgggccgaggtgatgcagcgaccctgcacctgcgacttcctgcacgggccgcgcacgcagcgccgcgctgccgcgcagatcgcgcaggcactgctgggcgccgaggagcgcaaagtggaaatcgccttctaccggaaagatgggagctgcttcctatgtctggtggatgtggtgcccgtgaagaacgaggatggggctgtcatcatgttcatcctcaatttcgaggtggtgatggagaaggacatggtggggtccccggctcatgacaccaaccaccggggcccccccaccagctggctggccccaggccgcgccaagaccttccgcctgaagctgcccgcgctgctggcgctgacggcccgggagtcgtcggtgcggtcgggcggcgcgggcggcgcgggcgccccgggggccgtggtggtggacgtggacctgacgcccgcggcacccagcagcgagtcgctggccctggacgaagtgacagccatggacaaccacgtggcagggctcgggcccgcggaggagcagcgtgcgctggtgggtcccggctctccgccccgcagcgcgcccggccagctcccatcgccccgggcgcacagcctcaaccccgacgcctcgggctccagctgcagcctggcccggacgcgctcccgagaaagctgcgccagcgtgcgccgcgcctcgtcggccgacgacatcgaggccatgcgcgccggggtgctgcccccgccaccgcgccacgccagcaccggggccatgcacccactgcgcagcggcttgctcaactccacctcggactccgacctcgtgcgctaccgcaccattagcaagattccccaaatcaccctcaactttgtggacctcaagggcgaccccttcttggcttcgcccaccagtgaccgtgagatcatagcacctaagataaaggagcgaacccacaatgtcactgagaaggtcacccaggtcctgtccctgggcgccgacgtgctgcctgagtacaagctgcaggcaccgcgcatccaccgctggaccatcctgcattacagccccttcaaggccgtgtgggactggctcatcctgctgctggtcatctacacggctgtcttcacaccctactcggctgccttcctgctgaaggagacggaagaaggcccgcctgctaccgagtgtggctacgcctgccagccgctggctgtggtggacctcatcgtggacatcatgttcattgtggacatcctcatcaacttccgcaccacctacgtcaatgccaacgaggaggtggtcagccaccccggccgcatcgccgtccactacttcaagggctggttcctcatcgacatggtggccgccatccccttcgacctgctcatcttcggctctggctctgaggagctgatcgggctgctgaagactgcgcggctgctgcggctggtgcgcgtggcgcggaagctggatcgctactcagagtacggcgcggccgtgctgttcttgctcatgtgcacctttgcgctcatcgcgcactggctagcctgcatctggtacgccatcggcaacatggagcagccacacatggactcacgcatcggctggctgcacaacctgggcgaccagataggcaaaccctacaacagcagcggcctgggcggcccctccatcaaggacaagtatgtgacggcgctctacttcaccttcagcagcctcaccagtgtgggcttcggcaacgtctctcccaacaccaactcagagaagatcttctccatctgcgtcatgctcattggctccctcatgtatgctagcatcttcggcaacgtgtcggccatcatccagcggctgtactcgggcacagcccgctaccacacacagatgctgcgggtgcgggagttcatccgcttccaccagatccccaatcccctgcgccagcgcctcgaggagtacttccagcacgcctggtcctacaccaacggcatcgacatgaacgcggtgctgaagggcttccctgagtgcctgcaggctgacatctgcctgcacctgaaccgctcactgctgcagcactgcaaacccttccgaggggccaccaagggctgccttcgggccctggccatgaagttcaagaccacacatgcaccgccaggggacacactggtgcatgctggggacctgctcaccgccctgtacttcatctcccggggctccatcgagatcctgcggggcgacgtcgtcgtggccatcctggggaagaatgacatctttggggagcctctgaacctgtatgcaaggcctggcaagtcgaacggggatgtgcgggccctcacctactgtgacctacacaagatccatcgggacgacctgctggaggtgctggacatgtaccctgagttctccgaccacttctggtccagcctggagatcaccttcaacctgcgagataccaacatgatcccgggctcccccggcagtacggagttagagggtggcttcagtcggcaacgcaagcgcaagttgtccttccgcaggcgcacggacaaggacacggagcagccaggggaggtgtcggccttggggccgggccgggcgggggcagggccgagtagccggggccggccgggggggccgtggggggagagcccgtccagtggcccctccagccctgagagcagtgaggatgagggcccaggccgcagctccagccccctccgcctggtgcccttctccagccccaggccccccggagagccgccgggtggggagcccctgatggaggactgcgagaagagcagcgacacttgcaaccccctgtcaggcgccttctcaggagtgtccaacattttcagcttctggggggacagtcggggccgccagtaccaggagctccctcgatgccccgcccccacccccagcctcctcaacatccccctctccagcccgggtcggcggccccggggcgacgtggagagcaggctggatgccctccagcgccagctcaacaggctggagacccggctgagtgcagacatggccactgtcctgcagctgctacagaggcagatgacgctggtcccgcccgcctacagtgctgtgaccaccccggggcctggccccacttccacatccccgctgttgcccgtcagccccctccccaccctcaccttggactcgctttctcaggtttcccagttcatggcgtgtgaggagctgcccccgggggccccagagcttccccaagaaggccccacacgacgcctctccctaccgggccagctgggggccctcacctcccagcccctgcacagacacggctcggacccgggcagttagtggggctgcccagtgtggacacgtggctcacccagggatcaaggcgctgctgggccgctccccttggaggccctgctcaggaggccctgaccgtggaaggggagaggaactcgaaagcacagctcctcccccagcccttgggaccatcttctcctgcagtcccctgggccccagtgagaggggcaggggcagggccggcagtaggtggggcctgtggtccccccactgccctgagggcattagctggtctaactgcccggaggcacccggccctgggccttaggcacctcaaggacttttctgctatttactgctcttattgttaaggataataattaaggatcatatgaataattaatgaagatgctgatgactatgaataataaataattatcctgaggaga

SEQ ID NO: 952 - DNA, 3884 bp, Homo sapiens
  source 1..3884: mol_type = genomic DNA
  misc_feature 1..3884: note = cDNA of KCNH2 gene SNP c.694C>T (p.Arg232Cys)
atgccggtgcggaggggccacgtcgcgccgcagaacaccttcctggacaccatcatccgcaagtttgagggccagagccgtaagttcatcatcgccaacgctcgggtggagaactgcgccgtcatctactgcaacgacggcttctgcgagctgtgcggctactcgcgggccgaggtgatgcagcgaccctgcacctgcgacttcctgcacgggccgcgcacgcagcgccgcgctgccgcgcagatcgcgcaggcactgctgggcgccgaggagcgcaaagtggaaatcgccttctaccggaaagatgggagctgcttcctatgtctggtggatgtggtgcccgtgaagaacgaggatggggctgtcatcatgttcatcctcaatttcgaggtggtgatggagaaggacatggtggggtccccggctcatgacaccaaccaccggggcccccccaccagctggctggccccaggccgcgccaagaccttccgcctgaagctgcccgcgctgctggcgctgacggcccgggagtcgtcggtgcggtcgggcggcgcgggcggcgcgggcgccccgggggccgtggtggtggacgtggacctgacgcccgcggcacccagcagcgagtcgctggccctggacgaagtgacagccatggacaaccacgtggcagggctcgggcccgcggaggagcggtgtgcgctggtgggtcccggctctccgccccgcagcgcgcccggccagctcccatcgccccgggcgcacagcctcaaccccgacgcctcgggctccagctgcagcctggcccggacgcgctcccgagaaagctgcgccagcgtgcgccgcgcctcgtcggccgacgacatcgaggccatgcgcgccggggtgctgcccccgccaccgcgccacgccagcaccggggccatgcacccactgcgcagcggcttgctcaactccacctcggactccgacctcgtgcgctaccgcaccattagcaagattccccaaatcaccctcaactttgtggacctcaagggcgaccccttcttggcttcgcccaccagtgaccgtgagatcatagcacctaagataaaggagcgaacccacaatgtcactgagaaggtcacccaggtcctgtccctgggcgccgacgtgctgcctgagtacaagctgcaggcaccgcgcatccaccgctggaccatcctgcattacagccccttcaaggccgtgtgggactggctcatcctgctgctggtcatctacacggctgtcttcacaccctactcggctgccttcctgctgaaggagacggaagaaggcccgcctgctaccgagtgtggctacgcctgccagccgctggctgtggtggacctcatcgtggacatcatgttcattgtggacatcctcatcaacttccgcaccacctacgtcaatgccaacgaggaggtggtcagccaccccggccgcatcgccgtccactacttcaagggctggttcctcatcgacatggtggccgccatccccttcgacctgctcatcttcggctctggctctgaggagctgatcgggctgctgaagactgcgcggctgctgcggctggtgcgcgtggcgcggaagctggatcgctactcagagtacggcgcggccgtgctgttcttgctcatgtgcacctttgcgctcatcgcgcactggctagcctgcatctggtacgccatcggcaacatggagcagccacacatggactcacgcatcggctggctgcacaacctgggcgaccagataggcaaaccctacaacagcagcggcctgggcggcccctccatcaaggacaagtatgtgacggcgctctacttcaccttcagcagcctcaccagtgtgggcttcggcaacgtctctcccaacaccaactcagagaagatcttctccatctgcgtcatgctcattggctccctcatgtatgctagcatcttcggcaacgtgtcggccatcatccagcggctgtactcgggcacagcccgctaccacacacagatgctgcgggtgcgggagttcatccgcttccaccagatccccaatcccctgcgccagcgcctcgaggagtacttccagcacgcctggtcctacaccaacggcatcgacatgaacgcggtgctgaagggcttccctgagtgcctgcaggctgacatctgcctgcacctgaaccgctcactgctgcagcactgcaaacccttccgaggggccaccaagggctgccttcgggccctggccatgaagttcaagaccacacatgcaccgccaggggacacactggtgcatgctggggacctgctcaccgccctgtacttcatctcccggggctccatcgagatcctgcggggcgacgtcgtcgtggccatcctggggaagaatgacatctttggggagcctctgaacctgtatgcaaggcctggcaagtcgaacggggatgtgcgggccctcacctactgtgacctacacaagatccatcgggacgacctgctggaggtgctggacatgtaccctgagttctccgaccacttctggtccagcctggagatcaccttcaacctgcgagataccaacatgatcccgggctcccccggcagtacggagttagagggtggcttcagtcggcaacgcaagcgcaagttgtccttccgcaggcgcacggacaaggacacggagcagccaggggaggtgtcggccttggggccgggccgggcgggggcagggccgagtagccggggccggccgggggggccgtggggggagagcccgtccagtggcccctccagccctgagagcagtgaggatgagggcccaggccgcagctccagccccctccgcctggtgcccttctccagccccaggccccccggagagccgccgggtggggagcccctgatggaggactgcgagaagagcagcgacacttgcaaccccctgtcaggcgccttctcaggagtgtccaacattttcagcttctggggggacagtcggggccgccagtaccaggagctccctcgatgccccgcccccacccccagcctcctcaacatccccctctccagcccgggtcggcggccccggggcgacgtggagagcaggctggatgccctccagcgccagctcaacaggctggagacccggctgagtgcagacatggccactgtcctgcagctgctacagaggcagatgacgctggtcccgcccgcctacagtgctgtgaccaccccggggcctggccccacttccacatccccgctgttgcccgtcagccccctccccaccctcaccttggactcgctttctcaggtttcccagttcatggcgtgtgaggagctgcccccgggggccccagagcttccccaagaaggccccacacgacgcctctccctaccgggccagctgggggccctcacctcccagcccctgcacagacacggctcggacccgggcagttagtggggctgcccagtgtggacacgtggctcacccagggatcaaggcgctgctgggccgctccccttggaggccctgctcaggaggccctgaccgtggaaggggagaggaactcgaaagcacagctcctcccccagcccttgggaccatcttctcctgcagtcccctgggccccagtgagaggggcaggggcagggccggcagtaggtggggcctgtggtccccccactgccctgagggcattagctggtctaactgcccggaggcacccggccctgggccttaggcacctcaaggacttttctgctatttactgctcttattgttaaggataataattaaggatcatatgaataattaatgaagatgctgatgactatgaataataaataattatcctgaggaga

SEQ ID NO: 953 - DNA, 3884 bp, Homo sapiens
  source 1..3884: mol_type = genomic DNA
  misc_feature 1..3884: note = cDNA of KCNH2 gene SNP c.695G>T (p.Arg232Leu)
atgccggtgcggaggggccacgtcgcgccgcagaacaccttcctggacaccatcatccgcaagtttgagggccagagccgtaagttcatcatcgccaacgctcgggtggagaactgcgccgtcatctactgcaacgacggcttctgcgagctgtgcggctactcgcgggccgaggtgatgcagcgaccctgcacctgcgacttcctgcacgggccgcgcacgcagcgccgcgctgccgcgcagatcgcgcaggcactgctgggcgccgaggagcgcaaagtggaaatcgccttctaccggaaagatgggagctgcttcctatgtctggtggatgtggtgcccgtgaagaacgaggatggggctgtcatcatgttcatcctcaatttcgaggtggtgatggagaaggacatggtggggtccccggctcatgacaccaaccaccggggcccccccaccagctggctggccccaggccgcgccaagaccttccgcctgaagctgcccgcgctgctggcgctgacggcccgggagtcgtcggtgcggtcgggcggcgcgggcggcgcgggcgccccgggggccgtggtggtggacgtggacctgacgcccgcggcacccagcagcgagtcgctggccctggacgaagtgacagccatggacaaccacgtggcagggctcgggcccgcggaggagcggcttgcgctggtgggtcccggctctccgccccgcagcgcgcccggccagctcccatcgccccgggcgcacagcctcaaccccgacgcctcgggctccagctgcagcctggcccggacgcgctcccgagaaagctgcgccagcgtgcgccgcgcctcgtcggccgacgacatcgaggccatgcgcgccggggtgctgcccccgccaccgcgccacgccagcaccggggccatgcacccactgcgcagcggcttgctcaactccacctcggactccgacctcgtgcgctaccgcaccattagcaagattccccaaatcaccctcaactttgtggacctcaagggcgaccccttcttggcttcgcccaccagtgaccgtgagatcatagcacctaagataaaggagcgaacccacaatgtcactgagaaggtcacccaggtcctgtccctgggcgccgacgtgctgcctgagtacaagctgcaggcaccgcgcatccaccgctggaccatcctgcattacagccccttcaaggccgtgtgggactggctcatcctgctgctggtcatctacacggctgtcttcacaccctactcggctgccttcctgctgaaggagacggaagaaggcccgcctgctaccgagtgtggctacgcctgccagccgctggctgtggtggacctcatcgtggacatcatgttcattgtggacatcctcatcaacttccgcaccacctacgtcaatgccaacgaggaggtggtcagccaccccggccgcatcgccgtccactacttcaagggctggttcctcatcgacatggtggccgccatccccttcgacctgctcatcttcggctctggctctgaggagctgatcgggctgctgaagactgcgcggctgctgcggctggtgcgcgtggcgcggaagctggatcgctactcagagtacggcgcggccgtgctgttcttgctcatgtgcacctttgcgctcatcgcgcactggctagcctgcatctggtacgccatcggcaacatggagcagccacacatggactcacgcatcggctggctgcacaacctgggcgaccagataggcaaaccctacaacagcagcggcctgggcggcccctccatcaaggacaagtatgtgacggcgctctacttcaccttcagcagcctcaccagtgtgggcttcggcaacgtctctcccaacaccaactcagagaagatcttctccatctgcgtcatgctcattggctccctcatgtatgctagcatcttcggcaacgtgtcggccatcatccagcggctgtactcgggcacagcccgctaccacacacagatgctgcgggtgcgggagttcatccgcttccaccagatccccaatcccctgcgccagcgcctcgaggagtacttccagcacgcctggtcctacaccaacggcatcgacatgaacgcggtgctgaagggcttccctgagtgcctgcaggctgacatctgcctgcacctgaaccgctcactgctgcagcactgcaaacccttccgaggggccaccaagggctgccttcgggccctggccatgaagttcaagaccacacatgcaccgccaggggacacactggtgcatgctggggacctgctcaccgccctgtacttcatctcccggggctccatcgagatcctgcggggcgacgtcgtcgtggccatcctggggaagaatgacatctttggggagcctctgaacctgtatgcaaggcctggcaagtcgaacggggatgtgcgggccctcacctactgtgacctacacaagatccatcgggacgacctgctggaggtgctggacatgtaccctgagttctccgaccacttctggtccagcctggagatcaccttcaacctgcgagataccaacatgatcccgggctcccccggcagtacggagttagagggtggcttcagtcggcaacgcaagcgcaagttgtccttccgcaggcgcacggacaaggacacggagcagccaggggaggtgtcggccttggggccgggccgggcgggggcagggccgagtagccggggccggccgggggggccgtggggggagagcccgtccagtggcccctccagccctgagagcagtgaggatgagggcccaggccgcagctccagccccctccgcctggtgcccttctccagccccaggccccccggagagccgccgggtggggagcccctgatggaggactgcgagaagagcagcgacacttgcaaccccctgtcaggcgccttctcaggagtgtccaacattttcagcttctggggggacagtcggggccgccagtaccaggagctccctcgatgccccgcccccacccccagcctcctcaacatccccctctccagcccgggtcggcggccccggggcgacgtggagagcaggctggatgccctccagcgccagctcaacaggctggagacccggctgagtgcagacatggccactgtcctgcagctgctacagaggcagatgacgctggtcccgcccgcctacagtgctgtgaccaccccggggcctggccccacttccacatccccgctgttgcccgtcagccccctccccaccctcaccttggactcgctttctcaggtttcccagttcatggcgtgtgaggagctgcccccgggggccccagagcttccccaagaaggccccacacgacgcctctccctaccgggccagctgggggccctcacctcccagcccctgcacagacacggctcggacccgggcagttagtggggctgcccagtgtggacacgtggctcacccagggatcaaggcgctgctgggccgctccccttggaggccctgctcaggaggccctgaccgtggaaggggagaggaactcgaaagcacagctcctcccccagcccttgggaccatcttctcctgcagtcccctgggccccagtgagaggggcaggggcagggccggcagtaggtggggcctgtggtccccccactgccctgagggcattagctggtctaactgcccggaggcacccggccctgggccttaggcacctcaaggacttttctgctatttactgctcttattgttaaggataataattaaggatcatatgaataattaatgaagatgctgatgactatgaataataaataattatcctgaggaga

SEQ ID NO: 954 - DNA, 3884 bp, Homo sapiens
  source 1..3884: mol_type = genomic DNA
  misc_feature 1..3884: note = cDNA of KCNH2 gene SNP c.697G>A (p.Ala233Thr)
atgccggtgcggaggggccacgtcgcgccgcagaacaccttcctggacaccatcatccgcaagtttgagggccagagccgtaagttcatcatcgccaacgctcgggtggagaactgcgccgtcatctactgcaacgacggcttctgcgagctgtgcggctactcgcgggccgaggtgatgcagcgaccctgcacctgcgacttcctgcacgggccgcgcacgcagcgccgcgctgccgcgcagatcgcgcaggcactgctgggcgccgaggagcgcaaagtggaaatcgccttctaccggaaagatgggagctgcttcctatgtctggtggatgtggtgcccgtgaagaacgaggatggggctgtcatcatgttcatcctcaatttcgaggtggtgatggagaaggacatggtggggtccccggctcatgacaccaaccaccggggcccccccaccagctggctggccccaggccgcgccaagaccttccgcctgaagctgcccgcgctgctggcgctgacggcccgggagtcgtcggtgcggtcgggcggcgcgggcggcgcgggcgccccgggggccgtggtggtggacgtggacctgacgcccgcggcacccagcagcgagtcgctggccctggacgaagtgacagccatggacaaccacgtggcagggctcgggcccgcggaggagcggcgtacgctggtgggtcccggctctccgccccgcagcgcgcccggccagctcccatcgccccgggcgcacagcctcaaccccgacgcctcgggctccagctgcagcctggcccggacgcgctcccgagaaagctgcgccagcgtgcgccgcgcctcgtcggccgacgacatcgaggccatgcgcgccggggtgctgcccccgccaccgcgccacgccagcaccggggccatgcacccactgcgcagcggcttgctcaactccacctcggactccgacctcgtgcgctaccgcaccattagcaagattccccaaatcaccctcaactttgtggacctcaagggcgaccccttcttggcttcgcccaccagtgaccgtgagatcatagcacctaagataaaggagcgaacccacaatgtcactgagaaggtcacccaggtcctgtccctgggcgccgacgtgctgcctgagtacaagctgcaggcaccgcgcatccaccgctggaccatcctgcattacagccccttcaaggccgtgtgggactggctcatcctgctgctggtcatctacacggctgtcttcacaccctactcggctgccttcctgctgaaggagacggaagaaggcccgcctgctaccgagtgtggctacgcctgccagccgctggctgtggtggacctcatcgtggacatcatgttcattgtggacatcctcatcaacttccgcaccacctacgtcaatgccaacgaggaggtggtcagccaccccggccgcatcgccgtccactacttcaagggctggttcctcatcgacatggtggccgccatccccttcgacctgctcatcttcggctctggctctgaggagctgatcgggctgctgaagactgcgcggctgctgcggctggtgcgcgtggcgcggaagctggatcgctactcagagtacggcgcggccgtgctgttcttgctcatgtgcacctttgcgctcatcgcgcactggctagcctgcatctggtacgccatcggcaacatggagcagccacacatggactcacgcatcggctggctgcacaacctgggcgaccagataggcaaaccctacaacagcagcggcctgggcggcccctccatcaaggacaagtatgtgacggcgctctacttcaccttcagcagcctcaccagtgtgggcttcggcaacgtctctcccaacaccaactcagagaagatcttctccatctgcgtcatgctcattggctccctcatgtatgctagcatcttcggcaacgtgtcggccatcatccagcggctgtactcgggcacagcccgctaccacacacagatgctgcgggtgcgggagttcatccgcttccaccagatccccaatcccctgcgccagcgcctcgaggagtacttccagcacgcctggtcctacaccaacggcatcgacatgaacgcggtgctgaagggcttccctgagtgcctgcaggctgacatctgcctgcacctgaaccgctcactgctgcagcactgcaaacccttccgaggggccaccaagggctgccttcgggccctggccatgaagttcaagaccacacatgcaccgccaggggacacactggtgcatgctggggacctgctcaccgccctgtacttcatctcccggggctccatcgagatcctgcggggcgacgtcgtcgtggccatcctggggaagaatgacatctttggggagcctctgaacctgtatgcaaggcctggcaagtcgaacggggatgtgcgggccctcacctactgtgacctacacaagatccatcgggacgacctgctggaggtgctggacatgtaccctgagttctccgaccacttctggtccagcctggagatcaccttcaacctgcgagataccaacatgatcccgggctcccccggcagtacggagttagagggtggcttcagtcggcaacgcaagcgcaagttgtccttccgcaggcgcacggacaaggacacggagcagccaggggaggtgtcggccttggggccgggccgggcgggggcagggccgagtagccggggccggccgggggggccgtggggggagagcccgtccagtggcccctccagccctgagagcagtgaggatgagggcccaggccgcagctccagccccctccgcctggtgcccttctccagccccaggccccccggagagccgccgggtggggagcccctgatggaggactgcgagaagagcagcgacacttgcaaccccctgtcaggcgccttctcaggagtgtccaacattttcagcttctggggggacagtcggggccgccagtaccaggagctccctcgatgccccgcccccacccccagcctcctcaacatccccctctccagcccgggtcggcggccccggggcgacgtggagagcaggctggatgccctccagcgccagctcaacaggctggagacccggctgagtgcagacatggccactgtcctgcagctgctacagaggcagatgacgctggtcccgcccgcctacagtgctgtgaccaccccggggcctggccccacttccacatccccgctgttgcccgtcagccccctccccaccctcaccttggactcgctttctcaggtttcccagttcatggcgtgtgaggagctgcccccgggggccccagagcttccccaagaaggccccacacgacgcctctccctaccgggccagctgggggccctcacctcccagcccctgcacagacacggctcggacccgggcagttagtggggctgcccagtgtggacacgtggctcacccagggatcaaggcgctgctgggccgctccccttggaggccctgctcaggaggccctgaccgtggaaggggagaggaactcgaaagcacagctcctcccccagcccttgggaccatcttctcctgcagtcccctgggccccagtgagaggggcaggggcagggccggcagtaggtggggcctgtggtccccccactgccctgagggcattagctggtctaactgcccggaggcacccggccctgggccttaggcacctcaaggacttttctgctatttactgctcttattgttaaggataataattaaggatcatatgaataattaatgaagatgctgatgactatgaataataaataattatcctgaggaga

SEQ ID NO: 955 - DNA, 3884 bp, Homo sapiens
  source 1..3884: mol_type = genomic DNA
  misc_feature 1..3884: note = cDNA of KCNH2 gene SNP c.697G>T (p.Ala233Ser)
atgccggtgcggaggggccacgtcgcgccgcagaacaccttcctggacaccatcatccgcaagtttgagggccagagccgtaagttcatcatcgccaacgctcgggtggagaactgcgccgtcatctactgcaacgacggcttctgcgagctgtgcggctactcgcgggccgaggtgatgcagcgaccctgcacctgcgacttcctgcacgggccgcgcacgcagcgccgcgctgccgcgcagatcgcgcaggcactgctgggcgccgaggagcgcaaagtggaaatcgccttctaccggaaagatgggagctgcttcctatgtctggtggatgtggtgcccgtgaagaacgaggatggggctgtcatcatgttcatcctcaatttcgaggtggtgatggagaaggacatggtggggtccccggctcatgacaccaaccaccggggcccccccaccagctggctggccccaggccgcgccaagaccttccgcctgaagctgcccgcgctgctggcgctgacggcccgggagtcgtcggtgcggtcgggcggcgcgggcggcgcgggcgccccgggggccgtggtggtggacgtggacctgacgcccgcggcacccagcagcgagtcgctggccctggacgaagtgacagccatggacaaccacgtggcagggctcgggcccgcggaggagcggcgttcgctggtgggtcccggctctccgccccgcagcgcgcccggccagctcccatcgccccgggcgcacagcctcaaccccgacgcctcgggctccagctgcagcctggcccggacgcgctcccgagaaagctgcgccagcgtgcgccgcgcctcgtcggccgacgacatcgaggccatgcgcgccggggtgctgcccccgccaccgcgccacgccagcaccggggccatgcacccactgcgcagcggcttgctcaactccacctcggactccgacctcgtgcgctaccgcaccattagcaagattccccaaatcaccctcaactttgtggacctcaagggcgaccccttcttggcttcgcccaccagtgaccgtgagatcatagcacctaagataaaggagcgaacccacaatgtcactgagaaggtcacccaggtcctgtccctgggcgccgacgtgctgcctgagtacaagctgcaggcaccgcgcatccaccgctggaccatcctgcattacagccccttcaaggccgtgtgggactggctcatcctgctgctggtcatctacacggctgtcttcacaccctactcggctgccttcctgctgaaggagacggaagaaggcccgcctgctaccgagtgtggctacgcctgccagccgctggctgtggtggacctcatcgtggacatcatgttcattgtggacatcctcatcaacttccgcaccacctacgtcaatgccaacgaggaggtggtcagccaccccggccgcatcgccgtccactacttcaagggctggttcctcatcgacatggtggccgccatccccttcgacctgctcatcttcggctctggctctgaggagctgatcgggctgctgaagactgcgcggctgctgcggctggtgcgcgtggcgcggaagctggatcgctactcagagtacggcgcggccgtgctgttcttgctcatgtgcacctttgcgctcatcgcgcactggctagcctgcatctggtacgccatcggcaacatggagcagccacacatggactcacgcatcggctggctgcacaacctgggcgaccagataggcaaaccctacaacagcagcggcctgggcggcccctccatcaaggacaagtatgtgacggcgctctacttcaccttcagcagcctcaccagtgtgggcttcggcaacgtctctcccaacaccaactcagagaagatcttctccatctgcgtcatgctcattggctccctcatgtatgctagcatcttcggcaacgtgtcggccatcatccagcggctgtactcgggcacagcccgctaccacacacagatgctgcgggtgcgggagttcatccgcttccaccagatccccaatcccctgcgccagcgcctcgaggagtacttccagcacgcctggtcctacaccaacggcatcgacatgaacgcggtgctgaagggcttccctgagtgcctgcaggctgacatctgcctgcacctgaaccgctcactgctgcagcactgcaaacccttccgaggggccaccaagggctgccttcgggccctggccatgaagttcaagaccacacatgcaccgccaggggacacactggtgcatgctggggacctgctcaccgccctgtacttcatctcccggggctccatcgagatcctgcggggcgacgtcgtcgtggccatcctggggaagaatgacatctttggggagcctctgaacctgtatgcaaggcctggcaagtcgaacggggatgtgcgggccctcacctactgtgacctacacaagatccatcgggacgacctgctggaggtgctggacatgtaccctgagttctccgaccacttctggtccagcctggagatcaccttcaacctgcgagataccaacatgatcccgggctcccccggcagtacggagttagagggtggcttcagtcggcaacgcaagcgcaagttgtccttccgcaggcgcacggacaaggacacggagcagccaggggaggtgtcggccttggggccgggccgggcgggggcagggccgagtagccggggccggccgggggggccgtggggggagagcccgtccagtggcccctccagccctgagagcagtgaggatgagggcccaggccgcagctccagccccctccgcctggtgcccttctccagccccaggccccccggagagccgccgggtggggagcccctgatggaggactgcgagaagagcagcgacacttgcaaccccctgtcaggcgccttctcaggagtgtccaacattttcagcttctggggggacagtcggggccgccagtaccaggagctccctcgatgccccgcccccacccccagcctcctcaacatccccctctccagcccgggtcggcggccccggggcgacgtggagagcaggctggatgccctccagcgccagctcaacaggctggagacccggctgagtgcagacatggccactgtcctgcagctgctacagaggcagatgacgctggtcccgcccgcctacagtgctgtgaccaccccggggcctggccccacttccacatccccgctgttgcccgtcagccccctccccaccctcaccttggactcgctttctcaggtttcccagttcatggcgtgtgaggagctgcccccgggggccccagagcttccccaagaaggccccacacgacgcctctccctaccgggccagctgggggccctcacctcccagcccctgcacagacacggctcggacccgggcagttagtggggctgcccagtgtggacacgtggctcacccagggatcaaggcgctgctgggccgctccccttggaggccctgctcaggaggccctgaccgtggaaggggagaggaactcgaaagcacagctcctcccccagcccttgggaccatcttctcctgcagtcccctgggccccagtgagaggggcaggggcagggccggcagtaggtggggcctgtggtccccccactgccctgagggcattagctggtctaactgcccggaggcacccggccctgggccttaggcacctcaaggacttttctgctatttactgctcttattgttaaggataataattaaggatcatatgaataattaatgaagatgctgatgactatgaataataaataattatcctgaggaga

SEQ ID NO: 956 - DNA, 3884 bp, Homo sapiens
  source 1..3884: mol_type = genomic DNA
  misc_feature 1..3884: note = cDNA of KCNH2 gene SNP c.704T>C (p.Val235Ala)
atgccggtgcggaggggccacgtcgcgccgcagaacaccttcctggacaccatcatccgcaagtttgagggccagagccgtaagttcatcatcgccaacgctcgggtggagaactgcgccgtcatctactgcaacgacggcttctgcgagctgtgcggctactcgcgggccgaggtgatgcagcgaccctgcacctgcgacttcctgcacgggccgcgcacgcagcgccgcgctgccgcgcagatcgcgcaggcactgctgggcgccgaggagcgcaaagtggaaatcgccttctaccggaaagatgggagctgcttcctatgtctggtggatgtggtgcccgtgaagaacgaggatggggctgtcatcatgttcatcctcaatttcgaggtggtgatggagaaggacatggtggggtccccggctcatgacaccaaccaccggggcccccccaccagctggctggccccaggccgcgccaagaccttccgcctgaagctgcccgcgctgctggcgctgacggcccgggagtcgtcggtgcggtcgggcggcgcgggcggcgcgggcgccccgggggccgtggtggtggacgtggacctgacgcccgcggcacccagcagcgagtcgctggccctggacgaagtgacagccatggacaaccacgtggcagggctcgggcccgcggaggagcggcgtgcgctggcgggtcccggctctccgccccgcagcgcgcccggccagctcccatcgccccgggcgcacagcctcaaccccgacgcctcgggctccagctgcagcctggcccggacgcgctcccgagaaagctgcgccagcgtgcgccgcgcctcgtcggccgacgacatcgaggccatgcgcgccggggtgctgcccccgccaccgcgccacgccagcaccggggccatgcacccactgcgcagcggcttgctcaactccacctcggactccgacctcgtgcgctaccgcaccattagcaagattccccaaatcaccctcaactttgtggacctcaagggcgaccccttcttggcttcgcccaccagtgaccgtgagatcatagcacctaagataaaggagcgaacccacaatgtcactgagaaggtcacccaggtcctgtccctgggcgccgacgtgctgcctgagtacaagctgcaggcaccgcgcatccaccgctggaccatcctgcattacagccccttcaaggccgtgtgggactggctcatcctgctgctggtcatctacacggctgtcttcacaccctactcggctgccttcctgctgaaggagacggaagaaggcccgcctgctaccgagtgtggctacgcctgccagccgctggctgtggtggacctcatcgtggacatcatgttcattgtggacatcctcatcaacttccgcaccacctacgtcaatgccaacgaggaggtggtcagccaccccggccgcatcgccgtccactacttcaagggctggttcctcatcgacatggtggccgccatccccttcgacctgctcatcttcggctctggctctgaggagctgatcgggctgctgaagactgcgcggctgctgcggctggtgcgcgtggcgcggaagctggatcgctactcagagtacggcgcggccgtgctgttcttgctcatgtgcacctttgcgctcatcgcgcactggctagcctgcatctggtacgccatcggcaacatggagcagccacacatggactcacgcatcggctggctgcacaacctgggcgaccagataggcaaaccctacaacagcagcggcctgggcggcccctccatcaaggacaagtatgtgacggcgctctacttcaccttcagcagcctcaccagtgtgggcttcggcaacgtctctcccaacaccaactcagagaagatcttctccatctgcgtcatgctcattggctccctcatgtatgctagcatcttcggcaacgtgtcggccatcatccagcggctgtactcgggcacagcccgctaccacacacagatgctgcgggtgcgggagttcatccgcttccaccagatccccaatcccctgcgccagcgcctcgaggagtacttccagcacgcctggtcctacaccaacggcatcgacatgaacgcggtgctgaagggcttccctgagtgcctgcaggctgacatctgcctgcacctgaaccgctcactgctgcagcactgcaaacccttccgaggggccaccaagggctgccttcgggccctggccatgaagttcaagaccacacatgcaccgccaggggacacactggtgcatgctggggacctgctcaccgccctgtacttcatctcccggggctccatcgagatcctgcggggcgacgtcgtcgtggccatcctggggaagaatgacatctttggggagcctctgaacctgtatgcaaggcctggcaagtcgaacggggatgtgcgggccctcacctactgtgacctacacaagatccatcgggacgacctgctggaggtgctggacatgtaccctgagttctccgaccacttctggtccagcctggagatcaccttcaacctgcgagataccaacatgatcccgggctcccccggcagtacggagttagagggtggcttcagtcggcaacgcaagcgcaagttgtccttccgcaggcgcacggacaaggacacggagcagccaggggaggtgtcggccttggggccgggccgggcgggggcagggccgagtagccggggccggccgggggggccgtggggggagagcccgtccagtggcccctccagccctgagagcagtgaggatgagggcccaggccgcagctccagccccctccgcctggtgcccttctccagccccaggccccccggagagccgccgggtggggagcccctgatggaggactgcgagaagagcagcgacacttgcaaccccctgtcaggcgccttctcaggagtgtccaacattttcagcttctggggggacagtcggggccgccagtaccaggagctccctcgatgccccgcccccacccccagcctcctcaacatccccctctccagcccgggtcggcggccccggggcgacgtggagagcaggctggatgccctccagcgccagctcaacaggctggagacccggctgagtgcagacatggccactgtcctgcagctgctacagaggcagatgacgctggtcccgcccgcctacagtgctgtgaccaccccggggcctggccccacttccacatccccgctgttgcccgtcagccccctccccaccctcaccttggactcgctttctcaggtttcccagttcatggcgtgtgaggagctgcccccgggggccccagagcttccccaagaaggccccacacgacgcctctccctaccgggccagctgggggccctcacctcccagcccctgcacagacacggctcggacccgggcagttagtggggctgcccagtgtggacacgtggctcacccagggatcaaggcgctgctgggccgctccccttggaggccctgctcaggaggccctgaccgtggaaggggagaggaactcgaaagcacagctcctcccccagcccttgggaccatcttctcctgcagtcccctgggccccagtgagaggggcaggggcagggccggcagtaggtggggcctgtggtccccccactgccctgagggcattagctggtctaactgcccggaggcacccggccctgggccttaggcacctcaaggacttttctgctatttactgctcttattgttaaggataataattaaggatcatatgaataattaatgaagatgctgatgactatgaataataaataattatcctgaggaga

SEQ ID NO: 957 - DNA, 3884 bp, Homo sapiens
  source 1..3884: mol_type = genomic DNA
  misc_feature 1..3884: note = cDNA of KCNH2 gene SNP c.707G>A (p.Gly236Asp)
atgccggtgcggaggggccacgtcgcgccgcagaacaccttcctggacaccatcatccgcaagtttgagggccagagccgtaagttcatcatcgccaacgctcgggtggagaactgcgccgtcatctactgcaacgacggcttctgcgagctgtgcggctactcgcgggccgaggtgatgcagcgaccctgcacctgcgacttcctgcacgggccgcgcacgcagcgccgcgctgccgcgcagatcgcgcaggcactgctgggcgccgaggagcgcaaagtggaaatcgccttctaccggaaagatgggagctgcttcctatgtctggtggatgtggtgcccgtgaagaacgaggatggggctgtcatcatgttcatcctcaatttcgaggtggtgatggagaaggacatggtggggtccccggctcatgacaccaaccaccggggcccccccaccagctggctggccccaggccgcgccaagaccttccgcctgaagctgcccgcgctgctggcgctgacggcccgggagtcgtcggtgcggtcgggcggcgcgggcggcgcgggcgccccgggggccgtggtggtggacgtggacctgacgcccgcggcacccagcagcgagtcgctggccctggacgaagtgacagccatggacaaccacgtggcagggctcgggcccgcggaggagcggcgtgcgctggtggatcccggctctccgccccgcagcgcgcccggccagctcccatcgccccgggcgcacagcctcaaccccgacgcctcgggctccagctgcagcctggcccggacgcgctcccgagaaagctgcgccagcgtgcgccgcgcctcgtcggccgacgacatcgaggccatgcgcgccggggtgctgcccccgccaccgcgccacgccagcaccggggccatgcacccactgcgcagcggcttgctcaactccacctcggactccgacctcgtgcgctaccgcaccattagcaagattccccaaatcaccctcaactttgtggacctcaagggcgaccccttcttggcttcgcccaccagtgaccgtgagatcatagcacctaagataaaggagcgaacccacaatgtcactgagaaggtcacccaggtcctgtccctgggcgccgacgtgctgcctgagtacaagctgcaggcaccgcgcatccaccgctggaccatcctgcattacagccccttcaaggccgtgtgggactggctcatcctgctgctggtcatctacacggctgtcttcacaccctactcggctgccttcctgctgaaggagacggaagaaggcccgcctgctaccgagtgtggctacgcctgccagccgctggctgtggtggacctcatcgtggacatcatgttcattgtggacatcctcatcaacttccgcaccacctacgtcaatgccaacgaggaggtggtcagccaccccggccgcatcgccgtccactacttcaagggctggttcctcatcgacatggtggccgccatccccttcgacctgctcatcttcggctctggctctgaggagctgatcgggctgctgaagactgcgcggctgctgcggctggtgcgcgtggcgcggaagctggatcgctactcagagtacggcgcggccgtgctgttcttgctcatgtgcacctttgcgctcatcgcgcactggctagcctgcatctggtacgccatcggcaacatggagcagccacacatggactcacgcatcggctggctgcacaacctgggcgaccagataggcaaaccctacaacagcagcggcctgggcggcccctccatcaaggacaagtatgtgacggcgctctacttcaccttcagcagcctcaccagtgtgggcttcggcaacgtctctcccaacaccaactcagagaagatcttctccatctgcgtcatgctcattggctccctcatgtatgctagcatcttcggcaacgtgtcggccatcatccagcggctgtactcgggcacagcccgctaccacacacagatgctgcgggtgcgggagttcatccgcttccaccagatccccaatcccctgcgccagcgcctcgaggagtacttccagcacgcctggtcctacaccaacggcatcgacatgaacgcggtgctgaagggcttccctgagtgcctgcaggctgacatctgcctgcacctgaaccgctcactgctgcagcactgcaaacccttccgaggggccaccaagggctgccttcgggccctggccatgaagttcaagaccacacatgcaccgccaggggacacactggtgcatgctggggacctgctcaccgccctgtacttcatctcccggggctccatcgagatcctgcggggcgacgtcgtcgtggccatcctggggaagaatgacatctttggggagcctctgaacctgtatgcaaggcctggcaagtcgaacggggatgtgcgggccctcacctactgtgacctacacaagatccatcgggacgacctgctggaggtgctggacatgtaccctgagttctccgaccacttctggtccagcctggagatcaccttcaacctgcgagataccaacatgatcccgggctcccccggcagtacggagttagagggtggcttcagtcggcaacgcaagcgcaagttgtccttccgcaggcgcacggacaaggacacggagcagccaggggaggtgtcggccttggggccgggccgggcgggggcagggccgagtagccggggccggccgggggggccgtggggggagagcccgtccagtggcccctccagccctgagagcagtgaggatgagggcccaggccgcagctccagccccctccgcctggtgcccttctccagccccaggccccccggagagccgccgggtggggagcccctgatggaggactgcgagaagagcagcgacacttgcaaccccctgtcaggcgccttctcaggagtgtccaacattttcagcttctggggggacagtcggggccgccagtaccaggagctccctcgatgccccgcccccacccccagcctcctcaacatccccctctccagcccgggtcggcggccccggggcgacgtggagagcaggctggatgccctccagcgccagctcaacaggctggagacccggctgagtgcagacatggccactgtcctgcagctgctacagaggcagatgacgctggtcccgcccgcctacagtgctgtgaccaccccggggcctggccccacttccacatccccgctgttgcccgtcagccccctccccaccctcaccttggactcgctttctcaggtttcccagttcatggcgtgtgaggagctgcccccgggggccccagagcttccccaagaaggccccacacgacgcctctccctaccgggccagctgggggccctcacctcccagcccctgcacagacacggctcggacccgggcagttagtggggctgcccagtgtggacacgtggctcacccagggatcaaggcgctgctgggccgctccccttggaggccctgctcaggaggccctgaccgtggaaggggagaggaactcgaaagcacagctcctcccccagcccttgggaccatcttctcctgcagtcccctgggccccagtgagaggggcaggggcagggccggcagtaggtggggcctgtggtccccccactgccctgagggcattagctggtctaactgcccggaggcacccggccctgggccttaggcacctcaaggacttttctgctatttactgctcttattgttaaggataataattaaggatcatatgaataattaatgaagatgctgatgactatgaataataaataattatcctgaggaga

SEQ ID NO: 958 - DNA, 3884 bp, Homo sapiens
  source 1..3884: mol_type = genomic DNA
  misc_feature 1..3884: note = cDNA of KCNH2 gene SNP c.707G>T (p.Gly236Val)
atgccggtgcggaggggccacgtcgcgccgcagaacaccttcctggacaccatcatccgcaagtttgagggccagagccgtaagttcatcatcgccaacgctcgggtggagaactgcgccgtcatctactgcaacgacggcttctgcgagctgtgcggctactcgcgggccgaggtgatgcagcgaccctgcacctgcgacttcctgcacgggccgcgcacgcagcgccgcgctgccgcgcagatcgcgcaggcactgctgggcgccgaggagcgcaaagtggaaatcgccttctaccggaaagatgggagctgcttcctatgtctggtggatgtggtgcccgtgaagaacgaggatggggctgtcatcatgttcatcctcaatttcgaggtggtgatggagaaggacatggtggggtccccggctcatgacaccaaccaccggggcccccccaccagctggctggccccaggccgcgccaagaccttccgcctgaagctgcccgcgctgctggcgctgacggcccgggagtcgtcggtgcggtcgggcggcgcgggcggcgcgggcgccccgggggccgtggtggtggacgtggacctgacgcccgcggcacccagcagcgagtcgctggccctggacgaagtgacagccatggacaaccacgtggcagggctcgggcccgcggaggagcggcgtgcgctggtggttcccggctctccgccccgcagcgcgcccggccagctcccatcgccccgggcgcacagcctcaaccccgacgcctcgggctccagctgcagcctggcccggacgcgctcccgagaaagctgcgccagcgtgcgccgcgcctcgtcggccgacgacatcgaggccatgcgcgccggggtgctgcccccgccaccgcgccacgccagcaccggggccatgcacccactgcgcagcggcttgctcaactccacctcggactccgacctcgtgcgctaccgcaccattagcaagattccccaaatcaccctcaactttgtggacctcaagggcgaccccttcttggcttcgcccaccagtgaccgtgagatcatagcacctaagataaaggagcgaacccacaatgtcactgagaaggtcacccaggtcctgtccctgggcgccgacgtgctgcctgagtacaagctgcaggcaccgcgcatccaccgctggaccatcctgcattacagccccttcaaggccgtgtgggactggctcatcctgctgctggtcatctacacggctgtcttcacaccctactcggctgccttcctgctgaaggagacggaagaaggcccgcctgctaccgagtgtggctacgcctgccagccgctggctgtggtggacctcatcgtggacatcatgttcattgtggacatcctcatcaacttccgcaccacctacgtcaatgccaacgaggaggtggtcagccaccccggccgcatcgccgtccactacttcaagggctggttcctcatcgacatggtggccgccatccccttcgacctgctcatcttcggctctggctctgaggagctgatcgggctgctgaagactgcgcggctgctgcggctggtgcgcgtggcgcggaagctggatcgctactcagagtacggcgcggccgtgctgttcttgctcatgtgcacctttgcgctcatcgcgcactggctagcctgcatctggtacgccatcggcaacatggagcagccacacatggactcacgcatcggctggctgcacaacctgggcgaccagataggcaaaccctacaacagcagcggcctgggcggcccctccatcaaggacaagtatgtgacggcgctctacttcaccttcagcagcctcaccagtgtgggcttcggcaacgtctctcccaacaccaactcagagaagatcttctccatctgcgtcatgctcattggctccctcatgtatgctagcatcttcggcaacgtgtcggccatcatccagcggctgtactcgggcacagcccgctaccacacacagatgctgcgggtgcgggagttcatccgcttccaccagatccccaatcccctgcgccagcgcctcgaggagtacttccagcacgcctggtcctacaccaacggcatcgacatgaacgcggtgctgaagggcttccctgagtgcctgcaggctgacatctgcctgcacctgaaccgctcactgctgcagcactgcaaacccttccgaggggccaccaagggctgccttcgggccctggccatgaagttcaagaccacacatgcaccgccaggggacacactggtgcatgctggggacctgctcaccgccctgtacttcatctcccggggctccatcgagatcctgcggggcgacgtcgtcgtggccatcctggggaagaatgacatctttggggagcctctgaacctgtatgcaaggcctggcaagtcgaacggggatgtgcgggccctcacctactgtgacctacacaagatccatcgggacgacctgctggaggtgctggacatgtaccctgagttctccgaccacttctggtccagcctggagatcaccttcaacctgcgagataccaacatgatcccgggctcccccggcagtacggagttagagggtggcttcagtcggcaacgcaagcgcaagttgtccttccgcaggcgcacggacaaggacacggagcagccaggggaggtgtcggccttggggccgggccgggcgggggcagggccgagtagccggggccggccgggggggccgtggggggagagcccgtccagtggcccctccagccctgagagcagtgaggatgagggcccaggccgcagctccagccccctccgcctggtgcccttctccagccccaggccccccggagagccgccgggtggggagcccctgatggaggactgcgagaagagcagcgacacttgcaaccccctgtcaggcgccttctcaggagtgtccaacattttcagcttctggggggacagtcggggccgccagtaccaggagctccctcgatgccccgcccccacccccagcctcctcaacatccccctctccagcccgggtcggcggccccggggcgacgtggagagcaggctggatgccctccagcgccagctcaacaggctggagacccggctgagtgcagacatggccactgtcctgcagctgctacagaggcagatgacgctggtcccgcccgcctacagtgctgtgaccaccccggggcctggccccacttccacatccccgctgttgcccgtcagccccctccccaccctcaccttggactcgctttctcaggtttcccagttcatggcgtgtgaggagctgcccccgggggccccagagcttccccaagaaggccccacacgacgcctctccctaccgggccagctgggggccctcacctcccagcccctgcacagacacggctcggacccgggcagttagtggggctgcccagtgtggacacgtggctcacccagggatcaaggcgctgctgggccgctccccttggaggccctgctcaggaggccctgaccgtggaaggggagaggaactcgaaagcacagctcctcccccagcccttgggaccatcttctcctgcagtcccctgggccccagtgagaggggcaggggcagggccggcagtaggtggggcctgtggtccccccactgccctgagggcattagctggtctaactgcccggaggcacccggccctgggccttaggcacctcaaggacttttctgctatttactgctcttattgttaaggataataattaaggatcatatgaataattaatgaagatgctgatgactatgaataataaataattatcctgaggaga

SEQ ID NO: 959 - DNA, 3884 bp, Homo sapiens
  source 1..3884: mol_type = genomic DNA
  misc_feature 1..3884: note = cDNA of KCNH2 gene SNP c.710C>A (p.Pro237His)
atgccggtgcggaggggccacgtcgcgccgcagaacaccttcctggacaccatcatccgcaagtttgagggccagagccgtaagttcatcatcgccaacgctcgggtggagaactgcgccgtcatctactgcaacgacggcttctgcgagctgtgcggctactcgcgggccgaggtgatgcagcgaccctgcacctgcgacttcctgcacgggccgcgcacgcagcgccgcgctgccgcgcagatcgcgcaggcactgctgggcgccgaggagcgcaaagtggaaatcgccttctaccggaaagatgggagctgcttcctatgtctggtggatgtggtgcccgtgaagaacgaggatggggctgtcatcatgttcatcctcaatttcgaggtggtgatggagaaggacatggtggggtccccggctcatgacaccaaccaccggggcccccccaccagctggctggccccaggccgcgccaagaccttccgcctgaagctgcccgcgctgctggcgctgacggcccgggagtcgtcggtgcggtcgggcggcgcgggcggcgcgggcgccccgggggccgtggtggtggacgtggacctgacgcccgcggcacccagcagcgagtcgctggccctggacgaagtgacagccatggacaaccacgtggcagggctcgggcccgcggaggagcggcgtgcgctggtgggtcacggctctccgccccgcagcgcgcccggccagctcccatcgccccgggcgcacagcctcaaccccgacgcctcgggctccagctgcagcctggcccggacgcgctcccgagaaagctgcgccagcgtgcgccgcgcctcgtcggccgacgacatcgaggccatgcgcgccggggtgctgcccccgccaccgcgccacgccagcaccggggccatgcacccactgcgcagcggcttgctcaactccacctcggactccgacctcgtgcgctaccgcaccattagcaagattccccaaatcaccctcaactttgtggacctcaagggcgaccccttcttggcttcgcccaccagtgaccgtgagatcatagcacctaagataaaggagcgaacccacaatgtcactgagaaggtcacccaggtcctgtccctgggcgccgacgtgctgcctgagtacaagctgcaggcaccgcgcatccaccgctggaccatcctgcattacagccccttcaaggccgtgtgggactggctcatcctgctgctggtcatctacacggctgtcttcacaccctactcggctgccttcctgctgaaggagacggaagaaggcccgcctgctaccgagtgtggctacgcctgccagccgctggctgtggtggacctcatcgtggacatcatgttcattgtggacatcctcatcaacttccgcaccacctacgtcaatgccaacgaggaggtggtcagccaccccggccgcatcgccgtccactacttcaagggctggttcctcatcgacatggtggccgccatccccttcgacctgctcatcttcggctctggctctgaggagctgatcgggctgctgaagactgcgcggctgctgcggctggtgcgcgtggcgcggaagctggatcgctactcagagtacggcgcggccgtgctgttcttgctcatgtgcacctttgcgctcatcgcgcactggctagcctgcatctggtacgccatcggcaacatggagcagccacacatggactcacgcatcggctggctgcacaacctgggcgaccagataggcaaaccctacaacagcagcggcctgggcggcccctccatcaaggacaagtatgtgacggcgctctacttcaccttcagcagcctcaccagtgtgggcttcggcaacgtctctcccaacaccaactcagagaagatcttctccatctgcgtcatgctcattggctccctcatgtatgctagcatcttcggcaacgtgtcggccatcatccagcggctgtactcgggcacagcccgctaccacacacagatgctgcgggtgcgggagttcatccgcttccaccagatccccaatcccctgcgccagcgcctcgaggagtacttccagcacgcctggtcctacaccaacggcatcgacatgaacgcggtgctgaagggcttccctgagtgcctgcaggctgacatctgcctgcacctgaaccgctcactgctgcagcactgcaaacccttccgaggggccaccaagggctgccttcgggccctggccatgaagttcaagaccacacatgcaccgccaggggacacactggtgcatgctggggacctgctcaccgccctgtacttcatctcccggggctccatcgagatcctgcggggcgacgtcgtcgtggccatcctggggaagaatgacatctttggggagcctctgaacctgtatgcaaggcctggcaagtcgaacggggatgtgcgggccctcacctactgtgacctacacaagatccatcgggacgacctgctggaggtgctggacatgtaccctgagttctccgaccacttctggtccagcctggagatcaccttcaacctgcgagataccaacatgatcccgggctcccccggcagtacggagttagagggtggcttcagtcggcaacgcaagcgcaagttgtccttccgcaggcgcacggacaaggacacggagcagccaggggaggtgtcggccttggggccgggccgggcgggggcagggccgagtagccggggccggccgggggggccgtggggggagagcccgtccagtggcccctccagccctgagagcagtgaggatgagggcccaggccgcagctccagccccctccgcctggtgcccttctccagccccaggccccccggagagccgccgggtggggagcccctgatggaggactgcgagaagagcagcgacacttgcaaccccctgtcaggcgccttctcaggagtgtccaacattttcagcttctggggggacagtcggggccgccagtaccaggagctccctcgatgccccgcccccacccccagcctcctcaacatccccctctccagcccgggtcggcggccccggggcgacgtggagagcaggctggatgccctccagcgccagctcaacaggctggagacccggctgagtgcagacatggccactgtcctgcagctgctacagaggcagatgacgctggtcccgcccgcctacagtgctgtgaccaccccggggcctggccccacttccacatccccgctgttgcccgtcagccccctccccaccctcaccttggactcgctttctcaggtttcccagttcatggcgtgtgaggagctgcccccgggggccccagagcttccccaagaaggccccacacgacgcctctccctaccgggccagctgggggccctcacctcccagcccctgcacagacacggctcggacccgggcagttagtggggctgcccagtgtggacacgtggctcacccagggatcaaggcgctgctgggccgctccccttggaggccctgctcaggaggccctgaccgtggaaggggagaggaactcgaaagcacagctcctcccccagcccttgggaccatcttctcctgcagtcccctgggccccagtgagaggggcaggggcagggccggcagtaggtggggcctgtggtccccccactgccctgagggcattagctggtctaactgcccggaggcacccggccctgggccttaggcacctcaaggacttttctgctatttactgctcttattgttaaggataataattaaggatcatatgaataattaatgaagatgctgatgactatgaataataaataattatcctgaggaga

SEQ ID NO: 960 - DNA, 3884 bp, Homo sapiens
  source 1..3884: mol_type = genomic DNA
  misc_feature 1..3884: note = cDNA of KCNH2 gene SNP c.712G>A (p.Gly238Ser)
atgccggtgcggaggggccacgtcgcgccgcagaacaccttcctggacaccatcatccgcaagtttgagggccagagccgtaagttcatcatcgccaacgctcgggtggagaactgcgccgtcatctactgcaacgacggcttctgcgagctgtgcggctactcgcgggccgaggtgatgcagcgaccctgcacctgcgacttcctgcacgggccgcgcacgcagcgccgcgctgccgcgcagatcgcgcaggcactgctgggcgccgaggagcgcaaagtggaaatcgccttctaccggaaagatgggagctgcttcctatgtctggtggatgtggtgcccgtgaagaacgaggatggggctgtcatcatgttcatcctcaatttcgaggtggtgatggagaaggacatggtggggtccccggctcatgacaccaaccaccggggcccccccaccagctggctggccccaggccgcgccaagaccttccgcctgaagctgcccgcgctgctggcgctgacggcccgggagtcgtcggtgcggtcgggcggcgcgggcggcgcgggcgccccgggggccgtggtggtggacgtggacctgacgcccgcggcacccagcagcgagtcgctggccctggacgaagtgacagccatggacaaccacgtggcagggctcgggcccgcggaggagcggcgtgcgctggtgggtcccagctctccgccccgcagcgcgcccggccagctcccatcgccccgggcgcacagcctcaaccccgacgcctcgggctccagctgcagcctggcccggacgcgctcccgagaaagctgcgccagcgtgcgccgcgcctcgtcggccgacgacatcgaggccatgcgcgccggggtgctgcccccgccaccgcgccacgccagcaccggggccatgcacccactgcgcagcggcttgctcaactccacctcggactccgacctcgtgcgctaccgcaccattagcaagattccccaaatcaccctcaactttgtggacctcaagggcgaccccttcttggcttcgcccaccagtgaccgtgagatcatagcacctaagataaaggagcgaacccacaatgtcactgagaaggtcacccaggtcctgtccctgggcgccgacgtgctgcctgagtacaagctgcaggcaccgcgcatccaccgctggaccatcctgcattacagccccttcaaggccgtgtgggactggctcatcctgctgctggtcatctacacggctgtcttcacaccctactcggctgccttcctgctgaaggagacggaagaaggcccgcctgctaccgagtgtggctacgcctgccagccgctggctgtggtggacctcatcgtggacatcatgttcattgtggacatcctcatcaacttccgcaccacctacgtcaatgccaacgaggaggtggtcagccaccccggccgcatcgccgtccactacttcaagggctggttcctcatcgacatggtggccgccatccccttcgacctgctcatcttcggctctggctctgaggagctgatcgggctgctgaagactgcgcggctgctgcggctggtgcgcgtggcgcggaagctggatcgctactcagagtacggcgcggccgtgctgttcttgctcatgtgcacctttgcgctcatcgcgcactggctagcctgcatctggtacgccatcggcaacatggagcagccacacatggactcacgcatcggctggctgcacaacctgggcgaccagataggcaaaccctacaacagcagcggcctgggcggcccctccatcaaggacaagtatgtgacggcgctctacttcaccttcagcagcctcaccagtgtgggcttcggcaacgtctctcccaacaccaactcagagaagatcttctccatctgcgtcatgctcattggctccctcatgtatgctagcatcttcggcaacgtgtcggccatcatccagcggctgtactcgggcacagcccgctaccacacacagatgctgcgggtgcgggagttcatccgcttccaccagatccccaatcccctgcgccagcgcctcgaggagtacttccagcacgcctggtcctacaccaacggcatcgacatgaacgcggtgctgaagggcttccctgagtgcctgcaggctgacatctgcctgcacctgaaccgctcactgctgcagcactgcaaacccttccgaggggccaccaagggctgccttcgggccctggccatgaagttcaagaccacacatgcaccgccaggggacacactggtgcatgctggggacctgctcaccgccctgtacttcatctcccggggctccatcgagatcctgcggggcgacgtcgtcgtggccatcctggggaagaatgacatctttggggagcctctgaacctgtatgcaaggcctggcaagtcgaacggggatgtgcgggccctcacctactgtgacctacacaagatccatcgggacgacctgctggaggtgctggacatgtaccctgagttctccgaccacttctggtccagcctggagatcaccttcaacctgcgagataccaacatgatcccgggctcccccggcagtacggagttagagggtggcttcagtcggcaacgcaagcgcaagttgtccttccgcaggcgcacggacaaggacacggagcagccaggggaggtgtcggccttggggccgggccgggcgggggcagggccgagtagccggggccggccgggggggccgtggggggagagcccgtccagtggcccctccagccctgagagcagtgaggatgagggcccaggccgcagctccagccccctccgcctggtgcccttctccagccccaggccccccggagagccgccgggtggggagcccctgatggaggactgcgagaagagcagcgacacttgcaaccccctgtcaggcgccttctcaggagtgtccaacattttcagcttctggggggacagtcggggccgccagtaccaggagctccctcgatgccccgcccccacccccagcctcctcaacatccccctctccagcccgggtcggcggccccggggcgacgtggagagcaggctggatgccctccagcgccagctcaacaggctggagacccggctgagtgcagacatggccactgtcctgcagctgctacagaggcagatgacgctggtcccgcccgcctacagtgctgtgaccaccccggggcctggccccacttccacatccccgctgttgcccgtcagccccctccccaccctcaccttggactcgctttctcaggtttcccagttcatggcgtgtgaggagctgcccccgggggccccagagcttccccaagaaggccccacacgacgcctctccctaccgggccagctgggggccctcacctcccagcccctgcacagacacggctcggacccgggcagttagtggggctgcccagtgtggacacgtggctcacccagggatcaaggcgctgctgggccgctccccttggaggccctgctcaggaggccctgaccgtggaaggggagaggaactcgaaagcacagctcctcccccagcccttgggaccatcttctcctgcagtcccctgggccccagtgagaggggcaggggcagggccggcagtaggtggggcctgtggtccccccactgccctgagggcattagctggtctaactgcccggaggcacccggccctgggccttaggcacctcaaggacttttctgctatttactgctcttattgttaaggataataattaaggatcatatgaataattaatgaagatgctgatgactatgaataataaataattatcctgaggaga

SEQ ID NO: 961 - DNA, 3884 bp, Homo sapiens
  source 1..3884: mol_type = genomic DNA
  misc_feature 1..3884: note = cDNA of KCNH2 gene SNP c.719C>T (p.Pro240Leu)
atgccggtgcggaggggccacgtcgcgccgcagaacaccttcctggacaccatcatccgcaagtttgagggccagagccgtaagttcatcatcgccaacgctcgggtggagaactgcgccgtcatctactgcaacgacggcttctgcgagctgtgcggctactcgcgggccgaggtgatgcagcgaccctgcacctgcgacttcctgcacgggccgcgcacgcagcgccgcgctgccgcgcagatcgcgcaggcactgctgggcgccgaggagcgcaaagtggaaatcgccttctaccggaaagatgggagctgcttcctatgtctggtggatgtggtgcccgtgaagaacgaggatggggctgtcatcatgttcatcctcaatttcgaggtggtgatggagaaggacatggtggggtccccggctcatgacaccaaccaccggggcccccccaccagctggctggccccaggccgcgccaagaccttccgcctgaagctgcccgcgctgctggcgctgacggcccgggagtcgtcggtgcggtcgggcggcgcgggcggcgcgggcgccccgggggccgtggtggtggacgtggacctgacgcccgcggcacccagcagcgagtcgctggccctggacgaagtgacagccatggacaaccacgtggcagggctcgggcccgcggaggagcggcgtgcgctggtgggtcccggctctctgccccgcagcgcgcccggccagctcccatcgccccgggcgcacagcctcaaccccgacgcctcgggctccagctgcagcctggcccggacgcgctcccgagaaagctgcgccagcgtgcgccgcgcctcgtcggccgacgacatcgaggccatgcgcgccggggtgctgcccccgccaccgcgccacgccagcaccggggccatgcacccactgcgcagcggcttgctcaactccacctcggactccgacctcgtgcgctaccgcaccattagcaagattccccaaatcaccctcaactttgtggacctcaagggcgaccccttcttggcttcgcccaccagtgaccgtgagatcatagcacctaagataaaggagcgaacccacaatgtcactgagaaggtcacccaggtcctgtccctgggcgccgacgtgctgcctgagtacaagctgcaggcaccgcgcatccaccgctggaccatcctgcattacagccccttcaaggccgtgtgggactggctcatcctgctgctggtcatctacacggctgtcttcacaccctactcggctgccttcctgctgaaggagacggaagaaggcccgcctgctaccgagtgtggctacgcctgccagccgctggctgtggtggacctcatcgtggacatcatgttcattgtggacatcctcatcaacttccgcaccacctacgtcaatgccaacgaggaggtggtcagccaccccggccgcatcgccgtccactacttcaagggctggttcctcatcgacatggtggccgccatccccttcgacctgctcatcttcggctctggctctgaggagctgatcgggctgctgaagactgcgcggctgctgcggctggtgcgcgtggcgcggaagctggatcgctactcagagtacggcgcggccgtgctgttcttgctcatgtgcacctttgcgctcatcgcgcactggctagcctgcatctggtacgccatcggcaacatggagcagccacacatggactcacgcatcggctggctgcacaacctgggcgaccagataggcaaaccctacaacagcagcggcctgggcggcccctccatcaaggacaagtatgtgacggcgctctacttcaccttcagcagcctcaccagtgtgggcttcggcaacgtctctcccaacaccaactcagagaagatcttctccatctgcgtcatgctcattggctccctcatgtatgctagcatcttcggcaacgtgtcggccatcatccagcggctgtactcgggcacagcccgctaccacacacagatgctgcgggtgcgggagttcatccgcttccaccagatccccaatcccctgcgccagcgcctcgaggagtacttccagcacgcctggtcctacaccaacggcatcgacatgaacgcggtgctgaagggcttccctgagtgcctgcaggctgacatctgcctgcacctgaaccgctcactgctgcagcactgcaaacccttccgaggggccaccaagggctgccttcgggccctggccatgaagttcaagaccacacatgcaccgccaggggacacactggtgcatgctggggacctgctcaccgccctgtacttcatctcccggggctccatcgagatcctgcggggcgacgtcgtcgtggccatcctggggaagaatgacatctttggggagcctctgaacctgtatgcaaggcctggcaagtcgaacggggatgtgcgggccctcacctactgtgacctacacaagatccatcgggacgacctgctggaggtgctggacatgtaccctgagttctccgaccacttctggtccagcctggagatcaccttcaacctgcgagataccaacatgatcccgggctcccccggcagtacggagttagagggtggcttcagtcggcaacgcaagcgcaagttgtccttccgcaggcgcacggacaaggacacggagcagccaggggaggtgtcggccttggggccgggccgggcgggggcagggccgagtagccggggccggccgggggggccgtggggggagagcccgtccagtggcccctccagccctgagagcagtgaggatgagggcccaggccgcagctccagccccctccgcctggtgcccttctccagccccaggccccccggagagccgccgggtggggagcccctgatggaggactgcgagaagagcagcgacacttgcaaccccctgtcaggcgccttctcaggagtgtccaacattttcagcttctggggggacagtcggggccgccagtaccaggagctccctcgatgccccgcccccacccccagcctcctcaacatccccctctccagcccgggtcggcggccccggggcgacgtggagagcaggctggatgccctccagcgccagctcaacaggctggagacccggctgagtgcagacatggccactgtcctgcagctgctacagaggcagatgacgctggtcccgcccgcctacagtgctgtgaccaccccggggcctggccccacttccacatccccgctgttgcccgtcagccccctccccaccctcaccttggactcgctttctcaggtttcccagttcatggcgtgtgaggagctgcccccgggggccccagagcttccccaagaaggccccacacgacgcctctccctaccgggccagctgggggccctcacctcccagcccctgcacagacacggctcggacccgggcagttagtggggctgcccagtgtggacacgtggctcacccagggatcaaggcgctgctgggccgctccccttggaggccctgctcaggaggccctgaccgtggaaggggagaggaactcgaaagcacagctcctcccccagcccttgggaccatcttctcctgcagtcccctgggccccagtgagaggggcaggggcagggccggcagtaggtggggcctgtggtccccccactgccctgagggcattagctggtctaactgcccggaggcacccggccctgggccttaggcacctcaaggacttttctgctatttactgctcttattgttaaggataataattaaggatcatatgaataattaatgaagatgctgatgactatgaataataaataattatcctgaggaga

SEQ ID NO: 962 - DNA, 3884 bp, Homo sapiens
  source 1..3884: mol_type = genomic DNA
  misc_feature 1..3884: note = cDNA of KCNH2 gene SNP c.722C>T (p.Pro241Leu)
atgccggtgcggaggggccacgtcgcgccgcagaacaccttcctggacaccatcatccgcaagtttgagggccagagccgtaagttcatcatcgccaacgctcgggtggagaactgcgccgtcatctactgcaacgacggcttctgcgagctgtgcggctactcgcgggccgaggtgatgcagcgaccctgcacctgcgacttcctgcacgggccgcgcacgcagcgccgcgctgccgcgcagatcgcgcaggcactgctgggcgccgaggagcgcaaagtggaaatcgccttctaccggaaagatgggagctgcttcctatgtctggtggatgtggtgcccgtgaagaacgaggatggggctgtcatcatgttcatcctcaatttcgaggtggtgatggagaaggacatggtggggtccccggctcatgacaccaaccaccggggcccccccaccagctggctggccccaggccgcgccaagaccttccgcctgaagctgcccgcgctgctggcgctgacggcccgggagtcgtcggtgcggtcgggcggcgcgggcggcgcgggcgccccgggggccgtggtggtggacgtggacctgacgcccgcggcacccagcagcgagtcgctggccctggacgaagtgacagccatggacaaccacgtggcagggctcgggcccgcggaggagcggcgtgcgctggtgggtcccggctctccgctccgcagcgcgcccggccagctcccatcgccccgggcgcacagcctcaaccccgacgcctcgggctccagctgcagcctggcccggacgcgctcccgagaaagctgcgccagcgtgcgccgcgcctcgtcggccgacgacatcgaggccatgcgcgccggggtgctgcccccgccaccgcgccacgccagcaccggggccatgcacccactgcgcagcggcttgctcaactccacctcggactccgacctcgtgcgctaccgcaccattagcaagattccccaaatcaccctcaactttgtggacctcaagggcgaccccttcttggcttcgcccaccagtgaccgtgagatcatagcacctaagataaaggagcgaacccacaatgtcactgagaaggtcacccaggtcctgtccctgggcgccgacgtgctgcctgagtacaagctgcaggcaccgcgcatccaccgctggaccatcctgcattacagccccttcaaggccgtgtgggactggctcatcctgctgctggtcatctacacggctgtcttcacaccctactcggctgccttcctgctgaaggagacggaagaaggcccgcctgctaccgagtgtggctacgcctgccagccgctggctgtggtggacctcatcgtggacatcatgttcattgtggacatcctcatcaacttccgcaccacctacgtcaatgccaacgaggaggtggtcagccaccccggccgcatcgccgtccactacttcaagggctggttcctcatcgacatggtggccgccatccccttcgacctgctcatcttcggctctggctctgaggagctgatcgggctgctgaagactgcgcggctgctgcggctggtgcgcgtggcgcggaagctggatcgctactcagagtacggcgcggccgtgctgttcttgctcatgtgcacctttgcgctcatcgcgcactggctagcctgcatctggtacgccatcggcaacatggagcagccacacatggactcacgcatcggctggctgcacaacctgggcgaccagataggcaaaccctacaacagcagcggcctgggcggcccctccatcaaggacaagtatgtgacggcgctctacttcaccttcagcagcctcaccagtgtgggcttcggcaacgtctctcccaacaccaactcagagaagatcttctccatctgcgtcatgctcattggctccctcatgtatgctagcatcttcggcaacgtgtcggccatcatccagcggctgtactcgggcacagcccgctaccacacacagatgctgcgggtgcgggagttcatccgcttccaccagatccccaatcccctgcgccagcgcctcgaggagtacttccagcacgcctggtcctacaccaacggcatcgacatgaacgcggtgctgaagggcttccctgagtgcctgcaggctgacatctgcctgcacctgaaccgctcactgctgcagcactgcaaacccttccgaggggccaccaagggctgccttcgggccctggccatgaagttcaagaccacacatgcaccgccaggggacacactggtgcatgctggggacctgctcaccgccctgtacttcatctcccggggctccatcgagatcctgcggggcgacgtcgtcgtggccatcctggggaagaatgacatctttggggagcctctgaacctgtatgcaaggcctggcaagtcgaacggggatgtgcgggccctcacctactgtgacctacacaagatccatcgggacgacctgctggaggtgctggacatgtaccctgagttctccgaccacttctggtccagcctggagatcaccttcaacctgcgagataccaacatgatcccgggctcccccggcagtacggagttagagggtggcttcagtcggcaacgcaagcgcaagttgtccttccgcaggcgcacggacaaggacacggagcagccaggggaggtgtcggccttggggccgggccgggcgggggcagggccgagtagccggggccggccgggggggccgtggggggagagcccgtccagtggcccctccagccctgagagcagtgaggatgagggcccaggccgcagctccagccccctccgcctggtgcccttctccagccccaggccccccggagagccgccgggtggggagcccctgatggaggactgcgagaagagcagcgacacttgcaaccccctgtcaggcgccttctcaggagtgtccaacattttcagcttctggggggacagtcggggccgccagtaccaggagctccctcgatgccccgcccccacccccagcctcctcaacatccccctctccagcccgggtcggcggccccggggcgacgtggagagcaggctggatgccctccagcgccagctcaacaggctggagacccggctgagtgcagacatggccactgtcctgcagctgctacagaggcagatgacgctggtcccgcccgcctacagtgctgtgaccaccccggggcctggccccacttccacatccccgctgttgcccgtcagccccctccccaccctcaccttggactcgctttctcaggtttcccagttcatggcgtgtgaggagctgcccccgggggccccagagcttccccaagaaggccccacacgacgcctctccctaccgggccagctgggggccctcacctcccagcccctgcacagacacggctcggacccgggcagttagtggggctgcccagtgtggacacgtggctcacccagggatcaaggcgctgctgggccgctccccttggaggccctgctcaggaggccctgaccgtggaaggggagaggaactcgaaagcacagctcctcccccagcccttgggaccatcttctcctgcagtcccctgggccccagtgagaggggcaggggcagggccggcagtaggtggggcctgtggtccccccactgccctgagggcattagctggtctaactgcccggaggcacccggccctgggccttaggcacctcaaggacttttctgctatttactgctcttattgttaaggataataattaaggatcatatgaataattaatgaagatgctgatgactatgaataataaataattatcctgaggaga

SEQ ID NO: 963 - DNA, 3884 bp, Homo sapiens
  source 1..3884: mol_type = genomic DNA
  misc_feature 1..3884: note = cDNA of KCNH2 gene SNP c.724C>G (p.Arg242Gly)
atgccggtgcggaggggccacgtcgcgccgcagaacaccttcctggacaccatcatccgcaagtttgagggccagagccgtaagttcatcatcgccaacgctcgggtggagaactgcgccgtcatctactgcaacgacggcttctgcgagctgtgcggctactcgcgggccgaggtgatgcagcgaccctgcacctgcgacttcctgcacgggccgcgcacgcagcgccgcgctgccgcgcagatcgcgcaggcactgctgggcgccgaggagcgcaaagtggaaatcgccttctaccggaaagatgggagctgcttcctatgtctggtggatgtggtgcccgtgaagaacgaggatggggctgtcatcatgttcatcctcaatttcgaggtggtgatggagaaggacatggtggggtccccggctcatgacaccaaccaccggggcccccccaccagctggctggccccaggccgcgccaagaccttccgcctgaagctgcccgcgctgctggcgctgacggcccgggagtcgtcggtgcggtcgggcggcgcgggcggcgcgggcgccccgggggccgtggtggtggacgtggacctgacgcccgcggcacccagcagcgagtcgctggccctggacgaagtgacagccatggacaaccacgtggcagggctcgggcccgcggaggagcggcgtgcgctggtgggtcccggctctccgcccggcagcgcgcccggccagctcccatcgccccgggcgcacagcctcaaccccgacgcctcgggctccagctgcagcctggcccggacgcgctcccgagaaagctgcgccagcgtgcgccgcgcctcgtcggccgacgacatcgaggccatgcgcgccggggtgctgcccccgccaccgcgccacgccagcaccggggccatgcacccactgcgcagcggcttgctcaactccacctcggactccgacctcgtgcgctaccgcaccattagcaagattccccaaatcaccctcaactttgtggacctcaagggcgaccccttcttggcttcgcccaccagtgaccgtgagatcatagcacctaagataaaggagcgaacccacaatgtcactgagaaggtcacccaggtcctgtccctgggcgccgacgtgctgcctgagtacaagctgcaggcaccgcgcatccaccgctggaccatcctgcattacagccccttcaaggccgtgtgggactggctcatcctgctgctggtcatctacacggctgtcttcacaccctactcggctgccttcctgctgaaggagacggaagaaggcccgcctgctaccgagtgtggctacgcctgccagccgctggctgtggtggacctcatcgtggacatcatgttcattgtggacatcctcatcaacttccgcaccacctacgtcaatgccaacgaggaggtggtcagccaccccggccgcatcgccgtccactacttcaagggctggttcctcatcgacatggtggccgccatccccttcgacctgctcatcttcggctctggctctgaggagctgatcgggctgctgaagactgcgcggctgctgcggctggtgcgcgtggcgcggaagctggatcgctactcagagtacggcgcggccgtgctgttcttgctcatgtgcacctttgcgctcatcgcgcactggctagcctgcatctggtacgccatcggcaacatggagcagccacacatggactcacgcatcggctggctgcacaacctgggcgaccagataggcaaaccctacaacagcagcggcctgggcggcccctccatcaaggacaagtatgtgacggcgctctacttcaccttcagcagcctcaccagtgtgggcttcggcaacgtctctcccaacaccaactcagagaagatcttctccatctgcgtcatgctcattggctccctcatgtatgctagcatcttcggcaacgtgtcggccatcatccagcggctgtactcgggcacagcccgctaccacacacagatgctgcgggtgcgggagttcatccgcttccaccagatccccaatcccctgcgccagcgcctcgaggagtacttccagcacgcctggtcctacaccaacggcatcgacatgaacgcggtgctgaagggcttccctgagtgcctgcaggctgacatctgcctgcacctgaaccgctcactgctgcagcactgcaaacccttccgaggggccaccaagggctgccttcgggccctggccatgaagttcaagaccacacatgcaccgccaggggacacactggtgcatgctggggacctgctcaccgccctgtacttcatctcccggggctccatcgagatcctgcggggcgacgtcgtcgtggccatcctggggaagaatgacatctttggggagcctctgaacctgtatgcaaggcctggcaagtcgaacggggatgtgcgggccctcacctactgtgacctacacaagatccatcgggacgacctgctggaggtgctggacatgtaccctgagttctccgaccacttctggtccagcctggagatcaccttcaacctgcgagataccaacatgatcccgggctcccccggcagtacggagttagagggtggcttcagtcggcaacgcaagcgcaagttgtccttccgcaggcgcacggacaaggacacggagcagccaggggaggtgtcggccttggggccgggccgggcgggggcagggccgagtagccggggccggccgggggggccgtggggggagagcccgtccagtggcccctccagccctgagagcagtgaggatgagggcccaggccgcagctccagccccctccgcctggtgcccttctccagccccaggccccccggagagccgccgggtggggagcccctgatggaggactgcgagaagagcagcgacacttgcaaccccctgtcaggcgccttctcaggagtgtccaacattttcagcttctggggggacagtcggggccgccagtaccaggagctccctcgatgccccgcccccacccccagcctcctcaacatccccctctccagcccgggtcggcggccccggggcgacgtggagagcaggctggatgccctccagcgccagctcaacaggctggagacccggctgagtgcagacatggccactgtcctgcagctgctacagaggcagatgacgctggtcccgcccgcctacagtgctgtgaccaccccggggcctggccccacttccacatccccgctgttgcccgtcagccccctccccaccctcaccttggactcgctttctcaggtttcccagttcatggcgtgtgaggagctgcccccgggggccccagagcttccccaagaaggccccacacgacgcctctccctaccgggccagctgggggccctcacctcccagcccctgcacagacacggctcggacccgggcagttagtggggctgcccagtgtggacacgtggctcacccagggatcaaggcgctgctgggccgctccccttggaggccctgctcaggaggccctgaccgtggaaggggagaggaactcgaaagcacagctcctcccccagcccttgggaccatcttctcctgcagtcccctgggccccagtgagaggggcaggggcagggccggcagtaggtggggcctgtggtccccccactgccctgagggcattagctggtctaactgcccggaggcacccggccctgggccttaggcacctcaaggacttttctgctatttactgctcttattgttaaggataataattaaggatcatatgaataattaatgaagatgctgatgactatgaataataaataattatcctgaggaga

SEQ ID NO: 964 - DNA, 3884 bp, Homo sapiens
  source 1..3884: mol_type = genomic DNA
  misc_feature 1..3884: note = cDNA of KCNH2 gene SNP c.724C>T (p.Arg242Cys)
atgccggtgcggaggggccacgtcgcgccgcagaacaccttcctggacaccatcatccgcaagtttgagggccagagccgtaagttcatcatcgccaacgctcgggtggagaactgcgccgtcatctactgcaacgacggcttctgcgagctgtgcggctactcgcgggccgaggtgatgcagcgaccctgcacctgcgacttcctgcacgggccgcgcacgcagcgccgcgctgccgcgcagatcgcgcaggcactgctgggcgccgaggagcgcaaagtggaaatcgccttctaccggaaagatgggagctgcttcctatgtctggtggatgtggtgcccgtgaagaacgaggatggggctgtcatcatgttcatcctcaatttcgaggtggtgatggagaaggacatggtggggtccccggctcatgacaccaaccaccggggcccccccaccagctggctggccccaggccgcgccaagaccttccgcctgaagctgcccgcgctgctggcgctgacggcccgggagtcgtcggtgcggtcgggcggcgcgggcggcgcgggcgccccgggggccgtggtggtggacgtggacctgacgcccgcggcacccagcagcgagtcgctggccctggacgaagtgacagccatggacaaccacgtggcagggctcgggcccgcggaggagcggcgtgcgctggtgggtcccggctctccgccctgcagcgcgcccggccagctcccatcgccccgggcgcacagcctcaaccccgacgcctcgggctccagctgcagcctggcccggacgcgctcccgagaaagctgcgccagcgtgcgccgcgcctcgtcggccgacgacatcgaggccatgcgcgccggggtgctgcccccgccaccgcgccacgccagcaccggggccatgcacccactgcgcagcggcttgctcaactccacctcggactccgacctcgtgcgctaccgcaccattagcaagattccccaaatcaccctcaactttgtggacctcaagggcgaccccttcttggcttcgcccaccagtgaccgtgagatcatagcacctaagataaaggagcgaacccacaatgtcactgagaaggtcacccaggtcctgtccctgggcgccgacgtgctgcctgagtacaagctgcaggcaccgcgcatccaccgctggaccatcctgcattacagccccttcaaggccgtgtgggactggctcatcctgctgctggtcatctacacggctgtcttcacaccctactcggctgccttcctgctgaaggagacggaagaaggcccgcctgctaccgagtgtggctacgcctgccagccgctggctgtggtggacctcatcgtggacatcatgttcattgtggacatcctcatcaacttccgcaccacctacgtcaatgccaacgaggaggtggtcagccaccccggccgcatcgccgtccactacttcaagggctggttcctcatcgacatggtggccgccatccccttcgacctgctcatcttcggctctggctctgaggagctgatcgggctgctgaagactgcgcggctgctgcggctggtgcgcgtggcgcggaagctggatcgctactcagagtacggcgcggccgtgctgttcttgctcatgtgcacctttgcgctcatcgcgcactggctagcctgcatctggtacgccatcggcaacatggagcagccacacatggactcacgcatcggctggctgcacaacctgggcgaccagataggcaaaccctacaacagcagcggcctgggcggcccctccatcaaggacaagtatgtgacggcgctctacttcaccttcagcagcctcaccagtgtgggcttcggcaacgtctctcccaacaccaactcagagaagatcttctccatctgcgtcatgctcattggctccctcatgtatgctagcatcttcggcaacgtgtcggccatcatccagcggctgtactcgggcacagcccgctaccacacacagatgctgcgggtgcgggagttcatccgcttccaccagatccccaatcccctgcgccagcgcctcgaggagtacttccagcacgcctggtcctacaccaacggcatcgacatgaacgcggtgctgaagggcttccctgagtgcctgcaggctgacatctgcctgcacctgaaccgctcactgctgcagcactgcaaacccttccgaggggccaccaagggctgccttcgggccctggccatgaagttcaagaccacacatgcaccgccaggggacacactggtgcatgctggggacctgctcaccgccctgtacttcatctcccggggctccatcgagatcctgcggggcgacgtcgtcgtggccatcctggggaagaatgacatctttggggagcctctgaacctgtatgcaaggcctggcaagtcgaacggggatgtgcgggccctcacctactgtgacctacacaagatccatcgggacgacctgctggaggtgctggacatgtaccctgagttctccgaccacttctggtccagcctggagatcaccttcaacctgcgagataccaacatgatcccgggctcccccggcagtacggagttagagggtggcttcagtcggcaacgcaagcgcaagttgtccttccgcaggcgcacggacaaggacacggagcagccaggggaggtgtcggccttggggccgggccgggcgggggcagggccgagtagccggggccggccgggggggccgtggggggagagcccgtccagtggcccctccagccctgagagcagtgaggatgagggcccaggccgcagctccagccccctccgcctggtgcccttctccagccccaggccccccggagagccgccgggtggggagcccctgatggaggactgcgagaagagcagcgacacttgcaaccccctgtcaggcgccttctcaggagtgtccaacattttcagcttctggggggacagtcggggccgccagtaccaggagctccctcgatgccccgcccccacccccagcctcctcaacatccccctctccagcccgggtcggcggccccggggcgacgtggagagcaggctggatgccctccagcgccagctcaacaggctggagacccggctgagtgcagacatggccactgtcctgcagctgctacagaggcagatgacgctggtcccgcccgcctacagtgctgtgaccaccccggggcctggccccacttccacatccccgctgttgcccgtcagccccctccccaccctcaccttggactcgctttctcaggtttcccagttcatggcgtgtgaggagctgcccccgggggccccagagcttccccaagaaggccccacacgacgcctctccctaccgggccagctgggggccctcacctcccagcccctgcacagacacggctcggacccgggcagttagtggggctgcccagtgtggacacgtggctcacccagggatcaaggcgctgctgggccgctccccttggaggccctgctcaggaggccctgaccgtggaaggggagaggaactcgaaagcacagctcctcccccagcccttgggaccatcttctcctgcagtcccctgggccccagtgagaggggcaggggcagggccggcagtaggtggggcctgtggtccccccactgccctgagggcattagctggtctaactgcccggaggcacccggccctgggccttaggcacctcaaggacttttctgctatttactgctcttattgttaaggataataattaaggatcatatgaataattaatgaagatgctgatgactatgaataataaataattatcctgaggaga

SEQ ID NO: 965 - DNA, 3884 bp, Homo sapiens
  source 1..3884: mol_type = genomic DNA
  misc_feature 1..3884: note = cDNA of KCNH2 gene SNP c.729C>G (p.Ser243Arg)
atgccggtgcggaggggccacgtcgcgccgcagaacaccttcctggacaccatcatccgcaagtttgagggccagagccgtaagttcatcatcgccaacgctcgggtggagaactgcgccgtcatctactgcaacgacggcttctgcgagctgtgcggctactcgcgggccgaggtgatgcagcgaccctgcacctgcgacttcctgcacgggccgcgcacgcagcgccgcgctgccgcgcagatcgcgcaggcactgctgggcgccgaggagcgcaaagtggaaatcgccttctaccggaaagatgggagctgcttcctatgtctggtggatgtggtgcccgtgaagaacgaggatggggctgtcatcatgttcatcctcaatttcgaggtggtgatggagaaggacatggtggggtccccggctcatgacaccaaccaccggggcccccccaccagctggctggccccaggccgcgccaagaccttccgcctgaagctgcccgcgctgctggcgctgacggcccgggagtcgtcggtgcggtcgggcggcgcgggcggcgcgggcgccccgggggccgtggtggtggacgtggacctgacgcccgcggcacccagcagcgagtcgctggccctggacgaagtgacagccatggacaaccacgtggcagggctcgggcccgcggaggagcggcgtgcgctggtgggtcccggctctccgccccgcagggcgcccggccagctcccatcgccccgggcgcacagcctcaaccccgacgcctcgggctccagctgcagcctggcccggacgcgctcccgagaaagctgcgccagcgtgcgccgcgcctcgtcggccgacgacatcgaggccatgcgcgccggggtgctgcccccgccaccgcgccacgccagcaccggggccatgcacccactgcgcagcggcttgctcaactccacctcggactccgacctcgtgcgctaccgcaccattagcaagattccccaaatcaccctcaactttgtggacctcaagggcgaccccttcttggcttcgcccaccagtgaccgtgagatcatagcacctaagataaaggagcgaacccacaatgtcactgagaaggtcacccaggtcctgtccctgggcgccgacgtgctgcctgagtacaagctgcaggcaccgcgcatccaccgctggaccatcctgcattacagccccttcaaggccgtgtgggactggctcatcctgctgctggtcatctacacggctgtcttcacaccctactcggctgccttcctgctgaaggagacggaagaaggcccgcctgctaccgagtgtggctacgcctgccagccgctggctgtggtggacctcatcgtggacatcatgttcattgtggacatcctcatcaacttccgcaccacctacgtcaatgccaacgaggaggtggtcagccaccccggccgcatcgccgtccactacttcaagggctggttcctcatcgacatggtggccgccatccccttcgacctgctcatcttcggctctggctctgaggagctgatcgggctgctgaagactgcgcggctgctgcggctggtgcgcgtggcgcggaagctggatcgctactcagagtacggcgcggccgtgctgttcttgctcatgtgcacctttgcgctcatcgcgcactggctagcctgcatctggtacgccatcggcaacatggagcagccacacatggactcacgcatcggctggctgcacaacctgggcgaccagataggcaaaccctacaacagcagcggcctgggcggcccctccatcaaggacaagtatgtgacggcgctctacttcaccttcagcagcctcaccagtgtgggcttcggcaacgtctctcccaacaccaactcagagaagatcttctccatctgcgtcatgctcattggctccctcatgtatgctagcatcttcggcaacgtgtcggccatcatccagcggctgtactcgggcacagcccgctaccacacacagatgctgcgggtgcgggagttcatccgcttccaccagatccccaatcccctgcgccagcgcctcgaggagtacttccagcacgcctggtcctacaccaacggcatcgacatgaacgcggtgctgaagggcttccctgagtgcctgcaggctgacatctgcctgcacctgaaccgctcactgctgcagcactgcaaacccttccgaggggccaccaagggctgccttcgggccctggccatgaagttcaagaccacacatgcaccgccaggggacacactggtgcatgctggggacctgctcaccgccctgtacttcatctcccggggctccatcgagatcctgcggggcgacgtcgtcgtggccatcctggggaagaatgacatctttggggagcctctgaacctgtatgcaaggcctggcaagtcgaacggggatgtgcgggccctcacctactgtgacctacacaagatccatcgggacgacctgctggaggtgctggacatgtaccctgagttctccgaccacttctggtccagcctggagatcaccttcaacctgcgagataccaacatgatcccgggctcccccggcagtacggagttagagggtggcttcagtcggcaacgcaagcgcaagttgtccttccgcaggcgcacggacaaggacacggagcagccaggggaggtgtcggccttggggccgggccgggcgggggcagggccgagtagccggggccggccgggggggccgtggggggagagcccgtccagtggcccctccagccctgagagcagtgaggatgagggcccaggccgcagctccagccccctccgcctggtgcccttctccagccccaggccccccggagagccgccgggtggggagcccctgatggaggactgcgagaagagcagcgacacttgcaaccccctgtcaggcgccttctcaggagtgtccaacattttcagcttctggggggacagtcggggccgccagtaccaggagctccctcgatgccccgcccccacccccagcctcctcaacatccccctctccagcccgggtcggcggccccggggcgacgtggagagcaggctggatgccctccagcgccagctcaacaggctggagacccggctgagtgcagacatggccactgtcctgcagctgctacagaggcagatgacgctggtcccgcccgcctacagtgctgtgaccaccccggggcctggccccacttccacatccccgctgttgcccgtcagccccctccccaccctcaccttggactcgctttctcaggtttcccagttcatggcgtgtgaggagctgcccccgggggccccagagcttccccaagaaggccccacacgacgcctctccctaccgggccagctgggggccctcacctcccagcccctgcacagacacggctcggacccgggcagttagtggggctgcccagtgtggacacgtggctcacccagggatcaaggcgctgctgggccgctccccttggaggccctgctcaggaggccctgaccgtggaaggggagaggaactcgaaagcacagctcctcccccagcccttgggaccatcttctcctgcagtcccctgggccccagtgagaggggcaggggcagggccggcagtaggtggggcctgtggtccccccactgccctgagggcattagctggtctaactgcccggaggcacccggccctgggccttaggcacctcaaggacttttctgctatttactgctcttattgttaaggataataattaaggatcatatgaataattaatgaagatgctgatgactatgaataataaataattatcctgaggaga

SEQ ID NO: 966 - DNA, 3884 bp, Homo sapiens
  source 1..3884: mol_type = genomic DNA
  misc_feature 1..3884: note = cDNA of KCNH2 gene SNP c.731C>A (p.Ala244Glu)
atgccggtgcggaggggccacgtcgcgccgcagaacaccttcctggacaccatcatccgcaagtttgagggccagagccgtaagttcatcatcgccaacgctcgggtggagaactgcgccgtcatctactgcaacgacggcttctgcgagctgtgcggctactcgcgggccgaggtgatgcagcgaccctgcacctgcgacttcctgcacgggccgcgcacgcagcgccgcgctgccgcgcagatcgcgcaggcactgctgggcgccgaggagcgcaaagtggaaatcgccttctaccggaaagatgggagctgcttcctatgtctggtggatgtggtgcccgtgaagaacgaggatggggctgtcatcatgttcatcctcaatttcgaggtggtgatggagaaggacatggtggggtccccggctcatgacaccaaccaccggggcccccccaccagctggctggccccaggccgcgccaagaccttccgcctgaagctgcccgcgctgctggcgctgacggcccgggagtcgtcggtgcggtcgggcggcgcgggcggcgcgggcgccccgggggccgtggtggtggacgtggacctgacgcccgcggcacccagcagcgagtcgctggccctggacgaagtgacagccatggacaaccacgtggcagggctcgggcccgcggaggagcggcgtgcgctggtgggtcccggctctccgccccgcagcgagcccggccagctcccatcgccccgggcgcacagcctcaaccccgacgcctcgggctccagctgcagcctggcccggacgcgctcccgagaaagctgcgccagcgtgcgccgcgcctcgtcggccgacgacatcgaggccatgcgcgccggggtgctgcccccgccaccgcgccacgccagcaccggggccatgcacccactgcgcagcggcttgctcaactccacctcggactccgacctcgtgcgctaccgcaccattagcaagattccccaaatcaccctcaactttgtggacctcaagggcgaccccttcttggcttcgcccaccagtgaccgtgagatcatagcacctaagataaaggagcgaacccacaatgtcactgagaaggtcacccaggtcctgtccctgggcgccgacgtgctgcctgagtacaagctgcaggcaccgcgcatccaccgctggaccatcctgcattacagccccttcaaggccgtgtgggactggctcatcctgctgctggtcatctacacggctgtcttcacaccctactcggctgccttcctgctgaaggagacggaagaaggcccgcctgctaccgagtgtggctacgcctgccagccgctggctgtggtggacctcatcgtggacatcatgttcattgtggacatcctcatcaacttccgcaccacctacgtcaatgccaacgaggaggtggtcagccaccccggccgcatcgccgtccactacttcaagggctggttcctcatcgacatggtggccgccatccccttcgacctgctcatcttcggctctggctctgaggagctgatcgggctgctgaagactgcgcggctgctgcggctggtgcgcgtggcgcggaagctggatcgctactcagagtacggcgcggccgtgctgttcttgctcatgtgcacctttgcgctcatcgcgcactggctagcctgcatctggtacgccatcggcaacatggagcagccacacatggactcacgcatcggctggctgcacaacctgggcgaccagataggcaaaccctacaacagcagcggcctgggcggcccctccatcaaggacaagtatgtgacggcgctctacttcaccttcagcagcctcaccagtgtgggcttcggcaacgtctctcccaacaccaactcagagaagatcttctccatctgcgtcatgctcattggctccctcatgtatgctagcatcttcggcaacgtgtcggccatcatccagcggctgtactcgggcacagcccgctaccacacacagatgctgcgggtgcgggagttcatccgcttccaccagatccccaatcccctgcgccagcgcctcgaggagtacttccagcacgcctggtcctacaccaacggcatcgacatgaacgcggtgctgaagggcttccctgagtgcctgcaggctgacatctgcctgcacctgaaccgctcactgctgcagcactgcaaacccttccgaggggccaccaagggctgccttcgggccctggccatgaagttcaagaccacacatgcaccgccaggggacacactggtgcatgctggggacctgctcaccgccctgtacttcatctcccggggctccatcgagatcctgcggggcgacgtcgtcgtggccatcctggggaagaatgacatctttggggagcctctgaacctgtatgcaaggcctggcaagtcgaacggggatgtgcgggccctcacctactgtgacctacacaagatccatcgggacgacctgctggaggtgctggacatgtaccctgagttctccgaccacttctggtccagcctggagatcaccttcaacctgcgagataccaacatgatcccgggctcccccggcagtacggagttagagggtggcttcagtcggcaacgcaagcgcaagttgtccttccgcaggcgcacggacaaggacacggagcagccaggggaggtgtcggccttggggccgggccgggcgggggcagggccgagtagccggggccggccgggggggccgtggggggagagcccgtccagtggcccctccagccctgagagcagtgaggatgagggcccaggccgcagctccagccccctccgcctggtgcccttctccagccccaggccccccggagagccgccgggtggggagcccctgatggaggactgcgagaagagcagcgacacttgcaaccccctgtcaggcgccttctcaggagtgtccaacattttcagcttctggggggacagtcggggccgccagtaccaggagctccctcgatgccccgcccccacccccagcctcctcaacatccccctctccagcccgggtcggcggccccggggcgacgtggagagcaggctggatgccctccagcgccagctcaacaggctggagacccggctgagtgcagacatggccactgtcctgcagctgctacagaggcagatgacgctggtcccgcccgcctacagtgctgtgaccaccccggggcctggccccacttccacatccccgctgttgcccgtcagccccctccccaccctcaccttggactcgctttctcaggtttcccagttcatggcgtgtgaggagctgcccccgggggccccagagcttccccaagaaggccccacacgacgcctctccctaccgggccagctgggggccctcacctcccagcccctgcacagacacggctcggacccgggcagttagtggggctgcccagtgtggacacgtggctcacccagggatcaaggcgctgctgggccgctccccttggaggccctgctcaggaggccctgaccgtggaaggggagaggaactcgaaagcacagctcctcccccagcccttgggaccatcttctcctgcagtcccctgggccccagtgagaggggcaggggcagggccggcagtaggtggggcctgtggtccccccactgccctgagggcattagctggtctaactgcccggaggcacccggccctgggccttaggcacctcaaggacttttctgctatttactgctcttattgttaaggataataattaaggatcatatgaataattaatgaagatgctgatgactatgaataataaataattatcctgaggaga

SEQ ID NO: 967 - DNA, 3884 bp, Homo sapiens
  source 1..3884: mol_type = genomic DNA
  misc_feature 1..3884: note = cDNA of KCNH2 gene SNP c.731C>T (p.Ala244Val)
atgccggtgcggaggggccacgtcgcgccgcagaacaccttcctggacaccatcatccgcaagtttgagggccagagccgtaagttcatcatcgccaacgctcgggtggagaactgcgccgtcatctactgcaacgacggcttctgcgagctgtgcggctactcgcgggccgaggtgatgcagcgaccctgcacctgcgacttcctgcacgggccgcgcacgcagcgccgcgctgccgcgcagatcgcgcaggcactgctgggcgccgaggagcgcaaagtggaaatcgccttctaccggaaagatgggagctgcttcctatgtctggtggatgtggtgcccgtgaagaacgaggatggggctgtcatcatgttcatcctcaatttcgaggtggtgatggagaaggacatggtggggtccccggctcatgacaccaaccaccggggcccccccaccagctggctggccccaggccgcgccaagaccttccgcctgaagctgcccgcgctgctggcgctgacggcccgggagtcgtcggtgcggtcgggcggcgcgggcggcgcgggcgccccgggggccgtggtggtggacgtggacctgacgcccgcggcacccagcagcgagtcgctggccctggacgaagtgacagccatggacaaccacgtggcagggctcgggcccgcggaggagcggcgtgcgctggtgggtcccggctctccgccccgcagcgtgcccggccagctcccatcgccccgggcgcacagcctcaaccccgacgcctcgggctccagctgcagcctggcccggacgcgctcccgagaaagctgcgccagcgtgcgccgcgcctcgtcggccgacgacatcgaggccatgcgcgccggggtgctgcccccgccaccgcgccacgccagcaccggggccatgcacccactgcgcagcggcttgctcaactccacctcggactccgacctcgtgcgctaccgcaccattagcaagattccccaaatcaccctcaactttgtggacctcaagggcgaccccttcttggcttcgcccaccagtgaccgtgagatcatagcacctaagataaaggagcgaacccacaatgtcactgagaaggtcacccaggtcctgtccctgggcgccgacgtgctgcctgagtacaagctgcaggcaccgcgcatccaccgctggaccatcctgcattacagccccttcaaggccgtgtgggactggctcatcctgctgctggtcatctacacggctgtcttcacaccctactcggctgccttcctgctgaaggagacggaagaaggcccgcctgctaccgagtgtggctacgcctgccagccgctggctgtggtggacctcatcgtggacatcatgttcattgtggacatcctcatcaacttccgcaccacctacgtcaatgccaacgaggaggtggtcagccaccccggccgcatcgccgtccactacttcaagggctggttcctcatcgacatggtggccgccatccccttcgacctgctcatcttcggctctggctctgaggagctgatcgggctgctgaagactgcgcggctgctgcggctggtgcgcgtggcgcggaagctggatcgctactcagagtacggcgcggccgtgctgttcttgctcatgtgcacctttgcgctcatcgcgcactggctagcctgcatctggtacgccatcggcaacatggagcagccacacatggactcacgcatcggctggctgcacaacctgggcgaccagataggcaaaccctacaacagcagcggcctgggcggcccctccatcaaggacaagtatgtgacggcgctctacttcaccttcagcagcctcaccagtgtgggcttcggcaacgtctctcccaacaccaactcagagaagatcttctccatctgcgtcatgctcattggctccctcatgtatgctagcatcttcggcaacgtgtcggccatcatccagcggctgtactcgggcacagcccgctaccacacacagatgctgcgggtgcgggagttcatccgcttccaccagatccccaatcccctgcgccagcgcctcgaggagtacttccagcacgcctggtcctacaccaacggcatcgacatgaacgcggtgctgaagggcttccctgagtgcctgcaggctgacatctgcctgcacctgaaccgctcactgctgcagcactgcaaacccttccgaggggccaccaagggctgccttcgggccctggccatgaagttcaagaccacacatgcaccgccaggggacacactggtgcatgctggggacctgctcaccgccctgtacttcatctcccggggctccatcgagatcctgcggggcgacgtcgtcgtggccatcctggggaagaatgacatctttggggagcctctgaacctgtatgcaaggcctggcaagtcgaacggggatgtgcgggccctcacctactgtgacctacacaagatccatcgggacgacctgctggaggtgctggacatgtaccctgagttctccgaccacttctggtccagcctggagatcaccttcaacctgcgagataccaacatgatcccgggctcccccggcagtacggagttagagggtggcttcagtcggcaacgcaagcgcaagttgtccttccgcaggcgcacggacaaggacacggagcagccaggggaggtgtcggccttggggccgggccgggcgggggcagggccgagtagccggggccggccgggggggccgtggggggagagcccgtccagtggcccctccagccctgagagcagtgaggatgagggcccaggccgcagctccagccccctccgcctggtgcccttctccagccccaggccccccggagagccgccgggtggggagcccctgatggaggactgcgagaagagcagcgacacttgcaaccccctgtcaggcgccttctcaggagtgtccaacattttcagcttctggggggacagtcggggccgccagtaccaggagctccctcgatgccccgcccccacccccagcctcctcaacatccccctctccagcccgggtcggcggccccggggcgacgtggagagcaggctggatgccctccagcgccagctcaacaggctggagacccggctgagtgcagacatggccactgtcctgcagctgctacagaggcagatgacgctggtcccgcccgcctacagtgctgtgaccaccccggggcctggccccacttccacatccccgctgttgcccgtcagccccctccccaccctcaccttggactcgctttctcaggtttcccagttcatggcgtgtgaggagctgcccccgggggccccagagcttccccaagaaggccccacacgacgcctctccctaccgggccagctgggggccctcacctcccagcccctgcacagacacggctcggacccgggcagttagtggggctgcccagtgtggacacgtggctcacccagggatcaaggcgctgctgggccgctccccttggaggccctgctcaggaggccctgaccgtggaaggggagaggaactcgaaagcacagctcctcccccagcccttgggaccatcttctcctgcagtcccctgggccccagtgagaggggcaggggcagggccggcagtaggtggggcctgtggtccccccactgccctgagggcattagctggtctaactgcccggaggcacccggccctgggccttaggcacctcaaggacttttctgctatttactgctcttattgttaaggataataattaaggatcatatgaataattaatgaagatgctgatgactatgaataataaataattatcctgaggaga

SEQ ID NO: 968 - DNA, 3884 bp, Homo sapiens
  source 1..3884: mol_type = genomic DNA
  misc_feature 1..3884: note = cDNA of KCNH2 gene SNP c.736G>T (p.Gly246Cys)
atgccggtgcggaggggccacgtcgcgccgcagaacaccttcctggacaccatcatccgcaagtttgagggccagagccgtaagttcatcatcgccaacgctcgggtggagaactgcgccgtcatctactgcaacgacggcttctgcgagctgtgcggctactcgcgggccgaggtgatgcagcgaccctgcacctgcgacttcctgcacgggccgcgcacgcagcgccgcgctgccgcgcagatcgcgcaggcactgctgggcgccgaggagcgcaaagtggaaatcgccttctaccggaaagatgggagctgcttcctatgtctggtggatgtggtgcccgtgaagaacgaggatggggctgtcatcatgttcatcctcaatttcgaggtggtgatggagaaggacatggtggggtccccggctcatgacaccaaccaccggggcccccccaccagctggctggccccaggccgcgccaagaccttccgcctgaagctgcccgcgctgctggcgctgacggcccgggagtcgtcggtgcggtcgggcggcgcgggcggcgcgggcgccccgggggccgtggtggtggacgtggacctgacgcccgcggcacccagcagcgagtcgctggccctggacgaagtgacagccatggacaaccacgtggcagggctcgggcccgcggaggagcggcgtgcgctggtgggtcccggctctccgccccgcagcgcgccctgccagctcccatcgccccgggcgcacagcctcaaccccgacgcctcgggctccagctgcagcctggcccggacgcgctcccgagaaagctgcgccagcgtgcgccgcgcctcgtcggccgacgacatcgaggccatgcgcgccggggtgctgcccccgccaccgcgccacgccagcaccggggccatgcacccactgcgcagcggcttgctcaactccacctcggactccgacctcgtgcgctaccgcaccattagcaagattccccaaatcaccctcaactttgtggacctcaagggcgaccccttcttggcttcgcccaccagtgaccgtgagatcatagcacctaagataaaggagcgaacccacaatgtcactgagaaggtcacccaggtcctgtccctgggcgccgacgtgctgcctgagtacaagctgcaggcaccgcgcatccaccgctggaccatcctgcattacagccccttcaaggccgtgtgggactggctcatcctgctgctggtcatctacacggctgtcttcacaccctactcggctgccttcctgctgaaggagacggaagaaggcccgcctgctaccgagtgtggctacgcctgccagccgctggctgtggtggacctcatcgtggacatcatgttcattgtggacatcctcatcaacttccgcaccacctacgtcaatgccaacgaggaggtggtcagccaccccggccgcatcgccgtccactacttcaagggctggttcctcatcgacatggtggccgccatccccttcgacctgctcatcttcggctctggctctgaggagctgatcgggctgctgaagactgcgcggctgctgcggctggtgcgcgtggcgcggaagctggatcgctactcagagtacggcgcggccgtgctgttcttgctcatgtgcacctttgcgctcatcgcgcactggctagcctgcatctggtacgccatcggcaacatggagcagccacacatggactcacgcatcggctggctgcacaacctgggcgaccagataggcaaaccctacaacagcagcggcctgggcggcccctccatcaaggacaagtatgtgacggcgctctacttcaccttcagcagcctcaccagtgtgggcttcggcaacgtctctcccaacaccaactcagagaagatcttctccatctgcgtcatgctcattggctccctcatgtatgctagcatcttcggcaacgtgtcggccatcatccagcggctgtactcgggcacagcccgctaccacacacagatgctgcgggtgcgggagttcatccgcttccaccagatccccaatcccctgcgccagcgcctcgaggagtacttccagcacgcctggtcctacaccaacggcatcgacatgaacgcggtgctgaagggcttccctgagtgcctgcaggctgacatctgcctgcacctgaaccgctcactgctgcagcactgcaaacccttccgaggggccaccaagggctgccttcgggccctggccatgaagttcaagaccacacatgcaccgccaggggacacactggtgcatgctggggacctgctcaccgccctgtacttcatctcccggggctccatcgagatcctgcggggcgacgtcgtcgtggccatcctggggaagaatgacatctttggggagcctctgaacctgtatgcaaggcctggcaagtcgaacggggatgtgcgggccctcacctactgtgacctacacaagatccatcgggacgacctgctggaggtgctggacatgtaccctgagttctccgaccacttctggtccagcctggagatcaccttcaacctgcgagataccaacatgatcccgggctcccccggcagtacggagttagagggtggcttcagtcggcaacgcaagcgcaagttgtccttccgcaggcgcacggacaaggacacggagcagccaggggaggtgtcggccttggggccgggccgggcgggggcagggccgagtagccggggccggccgggggggccgtggggggagagcccgtccagtggcccctccagccctgagagcagtgaggatgagggcccaggccgcagctccagccccctccgcctggtgcccttctccagccccaggccccccggagagccgccgggtggggagcccctgatggaggactgcgagaagagcagcgacacttgcaaccccctgtcaggcgccttctcaggagtgtccaacattttcagcttctggggggacagtcggggccgccagtaccaggagctccctcgatgccccgcccccacccccagcctcctcaacatccccctctccagcccgggtcggcggccccggggcgacgtggagagcaggctggatgccctccagcgccagctcaacaggctggagacccggctgagtgcagacatggccactgtcctgcagctgctacagaggcagatgacgctggtcccgcccgcctacagtgctgtgaccaccccggggcctggccccacttccacatccccgctgttgcccgtcagccccctccccaccctcaccttggactcgctttctcaggtttcccagttcatggcgtgtgaggagctgcccccgggggccccagagcttccccaagaaggccccacacgacgcctctccctaccgggccagctgggggccctcacctcccagcccctgcacagacacggctcggacccgggcagttagtggggctgcccagtgtggacacgtggctcacccagggatcaaggcgctgctgggccgctccccttggaggccctgctcaggaggccctgaccgtggaaggggagaggaactcgaaagcacagctcctcccccagcccttgggaccatcttctcctgcagtcccctgggccccagtgagaggggcaggggcagggccggcagtaggtggggcctgtggtccccccactgccctgagggcattagctggtctaactgcccggaggcacccggccctgggccttaggcacctcaaggacttttctgctatttactgctcttattgttaaggataataattaaggatcatatgaataattaatgaagatgctgatgactatgaataataaataattatcctgaggaga

SEQ ID NO: 969 - DNA, 3884 bp, Homo sapiens
  source 1..3884: mol_type = genomic DNA
  misc_feature 1..3884: note = cDNA of KCNH2 gene SNP c.740A>G (p.Gln247Arg)
atgccggtgcggaggggccacgtcgcgccgcagaacaccttcctggacaccatcatccgcaagtttgagggccagagccgtaagttcatcatcgccaacgctcgggtggagaactgcgccgtcatctactgcaacgacggcttctgcgagctgtgcggctactcgcgggccgaggtgatgcagcgaccctgcacctgcgacttcctgcacgggccgcgcacgcagcgccgcgctgccgcgcagatcgcgcaggcactgctgggcgccgaggagcgcaaagtggaaatcgccttctaccggaaagatgggagctgcttcctatgtctggtggatgtggtgcccgtgaagaacgaggatggggctgtcatcatgttcatcctcaatttcgaggtggtgatggagaaggacatggtggggtccccggctcatgacaccaaccaccggggcccccccaccagctggctggccccaggccgcgccaagaccttccgcctgaagctgcccgcgctgctggcgctgacggcccgggagtcgtcggtgcggtcgggcggcgcgggcggcgcgggcgccccgggggccgtggtggtggacgtggacctgacgcccgcggcacccagcagcgagtcgctggccctggacgaagtgacagccatggacaaccacgtggcagggctcgggcccgcggaggagcggcgtgcgctggtgggtcccggctctccgccccgcagcgcgcccggccggctcccatcgccccgggcgcacagcctcaaccccgacgcctcgggctccagctgcagcctggcccggacgcgctcccgagaaagctgcgccagcgtgcgccgcgcctcgtcggccgacgacatcgaggccatgcgcgccggggtgctgcccccgccaccgcgccacgccagcaccggggccatgcacccactgcgcagcggcttgctcaactccacctcggactccgacctcgtgcgctaccgcaccattagcaagattccccaaatcaccctcaactttgtggacctcaagggcgaccccttcttggcttcgcccaccagtgaccgtgagatcatagcacctaagataaaggagcgaacccacaatgtcactgagaaggtcacccaggtcctgtccctgggcgccgacgtgctgcctgagtacaagctgcaggcaccgcgcatccaccgctggaccatcctgcattacagccccttcaaggccgtgtgggactggctcatcctgctgctggtcatctacacggctgtcttcacaccctactcggctgccttcctgctgaaggagacggaagaaggcccgcctgctaccgagtgtggctacgcctgccagccgctggctgtggtggacctcatcgtggacatcatgttcattgtggacatcctcatcaacttccgcaccacctacgtcaatgccaacgaggaggtggtcagccaccccggccgcatcgccgtccactacttcaagggctggttcctcatcgacatggtggccgccatccccttcgacctgctcatcttcggctctggctctgaggagctgatcgggctgctgaagactgcgcggctgctgcggctggtgcgcgtggcgcggaagctggatcgctactcagagtacggcgcggccgtgctgttcttgctcatgtgcacctttgcgctcatcgcgcactggctagcctgcatctggtacgccatcggcaacatggagcagccacacatggactcacgcatcggctggctgcacaacctgggcgaccagataggcaaaccctacaacagcagcggcctgggcggcccctccatcaaggacaagtatgtgacggcgctctacttcaccttcagcagcctcaccagtgtgggcttcggcaacgtctctcccaacaccaactcagagaagatcttctccatctgcgtcatgctcattggctccctcatgtatgctagcatcttcggcaacgtgtcggccatcatccagcggctgtactcgggcacagcccgctaccacacacagatgctgcgggtgcgggagttcatccgcttccaccagatccccaatcccctgcgccagcgcctcgaggagtacttccagcacgcctggtcctacaccaacggcatcgacatgaacgcggtgctgaagggcttccctgagtgcctgcaggctgacatctgcctgcacctgaaccgctcactgctgcagcactgcaaacccttccgaggggccaccaagggctgccttcgggccctggccatgaagttcaagaccacacatgcaccgccaggggacacactggtgcatgctggggacctgctcaccgccctgtacttcatctcccggggctccatcgagatcctgcggggcgacgtcgtcgtggccatcctggggaagaatgacatctttggggagcctctgaacctgtatgcaaggcctggcaagtcgaacggggatgtgcgggccctcacctactgtgacctacacaagatccatcgggacgacctgctggaggtgctggacatgtaccctgagttctccgaccacttctggtccagcctggagatcaccttcaacctgcgagataccaacatgatcccgggctcccccggcagtacggagttagagggtggcttcagtcggcaacgcaagcgcaagttgtccttccgcaggcgcacggacaaggacacggagcagccaggggaggtgtcggccttggggccgggccgggcgggggcagggccgagtagccggggccggccgggggggccgtggggggagagcccgtccagtggcccctccagccctgagagcagtgaggatgagggcccaggccgcagctccagccccctccgcctggtgcccttctccagccccaggccccccggagagccgccgggtggggagcccctgatggaggactgcgagaagagcagcgacacttgcaaccccctgtcaggcgccttctcaggagtgtccaacattttcagcttctggggggacagtcggggccgccagtaccaggagctccctcgatgccccgcccccacccccagcctcctcaacatccccctctccagcccgggtcggcggccccggggcgacgtggagagcaggctggatgccctccagcgccagctcaacaggctggagacccggctgagtgcagacatggccactgtcctgcagctgctacagaggcagatgacgctggtcccgcccgcctacagtgctgtgaccaccccggggcctggccccacttccacatccccgctgttgcccgtcagccccctccccaccctcaccttggactcgctttctcaggtttcccagttcatggcgtgtgaggagctgcccccgggggccccagagcttccccaagaaggccccacacgacgcctctccctaccgggccagctgggggccctcacctcccagcccctgcacagacacggctcggacccgggcagttagtggggctgcccagtgtggacacgtggctcacccagggatcaaggcgctgctgggccgctccccttggaggccctgctcaggaggccctgaccgtggaaggggagaggaactcgaaagcacagctcctcccccagcccttgggaccatcttctcctgcagtcccctgggccccagtgagaggggcaggggcagggccggcagtaggtggggcctgtggtccccccactgccctgagggcattagctggtctaactgcccggaggcacccggccctgggccttaggcacctcaaggacttttctgctatttactgctcttattgttaaggataataattaaggatcatatgaataattaatgaagatgctgatgactatgaataataaataattatcctgaggaga

SEQ ID NO: 970 - DNA, 3884 bp, Homo sapiens
  source 1..3884: mol_type = genomic DNA
  misc_feature 1..3884: note = cDNA of KCNH2 gene SNP c.749C>A (p.Ser250Ter)
atgccggtgcggaggggccacgtcgcgccgcagaacaccttcctggacaccatcatccgcaagtttgagggccagagccgtaagttcatcatcgccaacgctcgggtggagaactgcgccgtcatctactgcaacgacggcttctgcgagctgtgcggctactcgcgggccgaggtgatgcagcgaccctgcacctgcgacttcctgcacgggccgcgcacgcagcgccgcgctgccgcgcagatcgcgcaggcactgctgggcgccgaggagcgcaaagtggaaatcgccttctaccggaaagatgggagctgcttcctatgtctggtggatgtggtgcccgtgaagaacgaggatggggctgtcatcatgttcatcctcaatttcgaggtggtgatggagaaggacatggtggggtccccggctcatgacaccaaccaccggggcccccccaccagctggctggccccaggccgcgccaagaccttccgcctgaagctgcccgcgctgctggcgctgacggcccgggagtcgtcggtgcggtcgggcggcgcgggcggcgcgggcgccccgggggccgtggtggtggacgtggacctgacgcccgcggcacccagcagcgagtcgctggccctggacgaagtgacagccatggacaaccacgtggcagggctcgggcccgcggaggagcggcgtgcgctggtgggtcccggctctccgccccgcagcgcgcccggccagctcccatagccccgggcgcacagcctcaaccccgacgcctcgggctccagctgcagcctggcccggacgcgctcccgagaaagctgcgccagcgtgcgccgcgcctcgtcggccgacgacatcgaggccatgcgcgccggggtgctgcccccgccaccgcgccacgccagcaccggggccatgcacccactgcgcagcggcttgctcaactccacctcggactccgacctcgtgcgctaccgcaccattagcaagattccccaaatcaccctcaactttgtggacctcaagggcgaccccttcttggcttcgcccaccagtgaccgtgagatcatagcacctaagataaaggagcgaacccacaatgtcactgagaaggtcacccaggtcctgtccctgggcgccgacgtgctgcctgagtacaagctgcaggcaccgcgcatccaccgctggaccatcctgcattacagccccttcaaggccgtgtgggactggctcatcctgctgctggtcatctacacggctgtcttcacaccctactcggctgccttcctgctgaaggagacggaagaaggcccgcctgctaccgagtgtggctacgcctgccagccgctggctgtggtggacctcatcgtggacatcatgttcattgtggacatcctcatcaacttccgcaccacctacgtcaatgccaacgaggaggtggtcagccaccccggccgcatcgccgtccactacttcaagggctggttcctcatcgacatggtggccgccatccccttcgacctgctcatcttcggctctggctctgaggagctgatcgggctgctgaagactgcgcggctgctgcggctggtgcgcgtggcgcggaagctggatcgctactcagagtacggcgcggccgtgctgttcttgctcatgtgcacctttgcgctcatcgcgcactggctagcctgcatctggtacgccatcggcaacatggagcagccacacatggactcacgcatcggctggctgcacaacctgggcgaccagataggcaaaccctacaacagcagcggcctgggcggcccctccatcaaggacaagtatgtgacggcgctctacttcaccttcagcagcctcaccagtgtgggcttcggcaacgtctctcccaacaccaactcagagaagatcttctccatctgcgtcatgctcattggctccctcatgtatgctagcatcttcggcaacgtgtcggccatcatccagcggctgtactcgggcacagcccgctaccacacacagatgctgcgggtgcgggagttcatccgcttccaccagatccccaatcccctgcgccagcgcctcgaggagtacttccagcacgcctggtcctacaccaacggcatcgacatgaacgcggtgctgaagggcttccctgagtgcctgcaggctgacatctgcctgcacctgaaccgctcactgctgcagcactgcaaacccttccgaggggccaccaagggctgccttcgggccctggccatgaagttcaagaccacacatgcaccgccaggggacacactggtgcatgctggggacctgctcaccgccctgtacttcatctcccggggctccatcgagatcctgcggggcgacgtcgtcgtggccatcctggggaagaatgacatctttggggagcctctgaacctgtatgcaaggcctggcaagtcgaacggggatgtgcgggccctcacctactgtgacctacacaagatccatcgggacgacctgctggaggtgctggacatgtaccctgagttctccgaccacttctggtccagcctggagatcaccttcaacctgcgagataccaacatgatcccgggctcccccggcagtacggagttagagggtggcttcagtcggcaacgcaagcgcaagttgtccttccgcaggcgcacggacaaggacacggagcagccaggggaggtgtcggccttggggccgggccgggcgggggcagggccgagtagccggggccggccgggggggccgtggggggagagcccgtccagtggcccctccagccctgagagcagtgaggatgagggcccaggccgcagctccagccccctccgcctggtgcccttctccagccccaggccccccggagagccgccgggtggggagcccctgatggaggactgcgagaagagcagcgacacttgcaaccccctgtcaggcgccttctcaggagtgtccaacattttcagcttctggggggacagtcggggccgccagtaccaggagctccctcgatgccccgcccccacccccagcctcctcaacatccccctctccagcccgggtcggcggccccggggcgacgtggagagcaggctggatgccctccagcgccagctcaacaggctggagacccggctgagtgcagacatggccactgtcctgcagctgctacagaggcagatgacgctggtcccgcccgcctacagtgctgtgaccaccccggggcctggccccacttccacatccccgctgttgcccgtcagccccctccccaccctcaccttggactcgctttctcaggtttcccagttcatggcgtgtgaggagctgcccccgggggccccagagcttccccaagaaggccccacacgacgcctctccctaccgggccagctgggggccctcacctcccagcccctgcacagacacggctcggacccgggcagttagtggggctgcccagtgtggacacgtggctcacccagggatcaaggcgctgctgggccgctccccttggaggccctgctcaggaggccctgaccgtggaaggggagaggaactcgaaagcacagctcctcccccagcccttgggaccatcttctcctgcagtcccctgggccccagtgagaggggcaggggcagggccggcagtaggtggggcctgtggtccccccactgccctgagggcattagctggtctaactgcccggaggcacccggccctgggccttaggcacctcaaggacttttctgctatttactgctcttattgttaaggataataattaaggatcatatgaataattaatgaagatgctgatgactatgaataataaataattatcctgaggaga

SEQ ID NO: 971 - DNA, 3884 bp, Homo sapiens
  source 1..3884: mol_type = genomic DNA
  misc_feature 1..3884: note = cDNA of KCNH2 gene SNP c.751C>G (p.Pro251Ala)
atgccggtgcggaggggccacgtcgcgccgcagaacaccttcctggacaccatcatccgcaagtttgagggccagagccgtaagttcatcatcgccaacgctcgggtggagaactgcgccgtcatctactgcaacgacggcttctgcgagctgtgcggctactcgcgggccgaggtgatgcagcgaccctgcacctgcgacttcctgcacgggccgcgcacgcagcgccgcgctgccgcgcagatcgcgcaggcactgctgggcgccgaggagcgcaaagtggaaatcgccttctaccggaaagatgggagctgcttcctatgtctggtggatgtggtgcccgtgaagaacgaggatggggctgtcatcatgttcatcctcaatttcgaggtggtgatggagaaggacatggtggggtccccggctcatgacaccaaccaccggggcccccccaccagctggctggccccaggccgcgccaagaccttccgcctgaagctgcccgcgctgctggcgctgacggcccgggagtcgtcggtgcggtcgggcggcgcgggcggcgcgggcgccccgggggccgtggtggtggacgtggacctgacgcccgcggcacccagcagcgagtcgctggccctggacgaagtgacagccatggacaaccacgtggcagggctcgggcccgcggaggagcggcgtgcgctggtgggtcccggctctccgccccgcagcgcgcccggccagctcccatcggcccgggcgcacagcctcaaccccgacgcctcgggctccagctgcagcctggcccggacgcgctcccgagaaagctgcgccagcgtgcgccgcgcctcgtcggccgacgacatcgaggccatgcgcgccggggtgctgcccccgccaccgcgccacgccagcaccggggccatgcacccactgcgcagcggcttgctcaactccacctcggactccgacctcgtgcgctaccgcaccattagcaagattccccaaatcaccctcaactttgtggacctcaagggcgaccccttcttggcttcgcccaccagtgaccgtgagatcatagcacctaagataaaggagcgaacccacaatgtcactgagaaggtcacccaggtcctgtccctgggcgccgacgtgctgcctgagtacaagctgcaggcaccgcgcatccaccgctggaccatcctgcattacagccccttcaaggccgtgtgggactggctcatcctgctgctggtcatctacacggctgtcttcacaccctactcggctgccttcctgctgaaggagacggaagaaggcccgcctgctaccgagtgtggctacgcctgccagccgctggctgtggtggacctcatcgtggacatcatgttcattgtggacatcctcatcaacttccgcaccacctacgtcaatgccaacgaggaggtggtcagccaccccggccgcatcgccgtccactacttcaagggctggttcctcatcgacatggtggccgccatccccttcgacctgctcatcttcggctctggctctgaggagctgatcgggctgctgaagactgcgcggctgctgcggctggtgcgcgtggcgcggaagctggatcgctactcagagtacggcgcggccgtgctgttcttgctcatgtgcacctttgcgctcatcgcgcactggctagcctgcatctggtacgccatcggcaacatggagcagccacacatggactcacgcatcggctggctgcacaacctgggcgaccagataggcaaaccctacaacagcagcggcctgggcggcccctccatcaaggacaagtatgtgacggcgctctacttcaccttcagcagcctcaccagtgtgggcttcggcaacgtctctcccaacaccaactcagagaagatcttctccatctgcgtcatgctcattggctccctcatgtatgctagcatcttcggcaacgtgtcggccatcatccagcggctgtactcgggcacagcccgctaccacacacagatgctgcgggtgcgggagttcatccgcttccaccagatccccaatcccctgcgccagcgcctcgaggagtacttccagcacgcctggtcctacaccaacggcatcgacatgaacgcggtgctgaagggcttccctgagtgcctgcaggctgacatctgcctgcacctgaaccgctcactgctgcagcactgcaaacccttccgaggggccaccaagggctgccttcgggccctggccatgaagttcaagaccacacatgcaccgccaggggacacactggtgcatgctggggacctgctcaccgccctgtacttcatctcccggggctccatcgagatcctgcggggcgacgtcgtcgtggccatcctggggaagaatgacatctttggggagcctctgaacctgtatgcaaggcctggcaagtcgaacggggatgtgcgggccctcacctactgtgacctacacaagatccatcgggacgacctgctggaggtgctggacatgtaccctgagttctccgaccacttctggtccagcctggagatcaccttcaacctgcgagataccaacatgatcccgggctcccccggcagtacggagttagagggtggcttcagtcggcaacgcaagcgcaagttgtccttccgcaggcgcacggacaaggacacggagcagccaggggaggtgtcggccttggggccgggccgggcgggggcagggccgagtagccggggccggccgggggggccgtggggggagagcccgtccagtggcccctccagccctgagagcagtgaggatgagggcccaggccgcagctccagccccctccgcctggtgcccttctccagccccaggccccccggagagccgccgggtggggagcccctgatggaggactgcgagaagagcagcgacacttgcaaccccctgtcaggcgccttctcaggagtgtccaacattttcagcttctggggggacagtcggggccgccagtaccaggagctccctcgatgccccgcccccacccccagcctcctcaacatccccctctccagcccgggtcggcggccccggggcgacgtggagagcaggctggatgccctccagcgccagctcaacaggctggagacccggctgagtgcagacatggccactgtcctgcagctgctacagaggcagatgacgctggtcccgcccgcctacagtgctgtgaccaccccggggcctggccccacttccacatccccgctgttgcccgtcagccccctccccaccctcaccttggactcgctttctcaggtttcccagttcatggcgtgtgaggagctgcccccgggggccccagagcttccccaagaaggccccacacgacgcctctccctaccgggccagctgggggccctcacctcccagcccctgcacagacacggctcggacccgggcagttagtggggctgcccagtgtggacacgtggctcacccagggatcaaggcgctgctgggccgctccccttggaggccctgctcaggaggccctgaccgtggaaggggagaggaactcgaaagcacagctcctcccccagcccttgggaccatcttctcctgcagtcccctgggccccagtgagaggggcaggggcagggccggcagtaggtggggcctgtggtccccccactgccctgagggcattagctggtctaactgcccggaggcacccggccctgggccttaggcacctcaaggacttttctgctatttactgctcttattgttaaggataataattaaggatcatatgaataattaatgaagatgctgatgactatgaataataaataattatcctgaggaga

SEQ ID NO: 972 - DNA, 3884 bp, Homo sapiens
  source 1..3884: mol_type = genomic DNA
  misc_feature 1..3884: note = cDNA of KCNH2 gene SNP c.751C>T (p.Pro251Ser)
atgccggtgcggaggggccacgtcgcgccgcagaacaccttcctggacaccatcatccgcaagtttgagggccagagccgtaagttcatcatcgccaacgctcgggtggagaactgcgccgtcatctactgcaacgacggcttctgcgagctgtgcggctactcgcgggccgaggtgatgcagcgaccctgcacctgcgacttcctgcacgggccgcgcacgcagcgccgcgctgccgcgcagatcgcgcaggcactgctgggcgccgaggagcgcaaagtggaaatcgccttctaccggaaagatgggagctgcttcctatgtctggtggatgtggtgcccgtgaagaacgaggatggggctgtcatcatgttcatcctcaatttcgaggtggtgatggagaaggacatggtggggtccccggctcatgacaccaaccaccggggcccccccaccagctggctggccccaggccgcgccaagaccttccgcctgaagctgcccgcgctgctggcgctgacggcccgggagtcgtcggtgcggtcgggcggcgcgggcggcgcgggcgccccgggggccgtggtggtggacgtggacctgacgcccgcggcacccagcagcgagtcgctggccctggacgaagtgacagccatggacaaccacgtggcagggctcgggcccgcggaggagcggcgtgcgctggtgggtcccggctctccgccccgcagcgcgcccggccagctcccatcgtcccgggcgcacagcctcaaccccgacgcctcgggctccagctgcagcctggcccggacgcgctcccgagaaagctgcgccagcgtgcgccgcgcctcgtcggccgacgacatcgaggccatgcgcgccggggtgctgcccccgccaccgcgccacgccagcaccggggccatgcacccactgcgcagcggcttgctcaactccacctcggactccgacctcgtgcgctaccgcaccattagcaagattccccaaatcaccctcaactttgtggacctcaagggcgaccccttcttggcttcgcccaccagtgaccgtgagatcatagcacctaagataaaggagcgaacccacaatgtcactgagaaggtcacccaggtcctgtccctgggcgccgacgtgctgcctgagtacaagctgcaggcaccgcgcatccaccgctggaccatcctgcattacagccccttcaaggccgtgtgggactggctcatcctgctgctggtcatctacacggctgtcttcacaccctactcggctgccttcctgctgaaggagacggaagaaggcccgcctgctaccgagtgtggctacgcctgccagccgctggctgtggtggacctcatcgtggacatcatgttcattgtggacatcctcatcaacttccgcaccacctacgtcaatgccaacgaggaggtggtcagccaccccggccgcatcgccgtccactacttcaagggctggttcctcatcgacatggtggccgccatccccttcgacctgctcatcttcggctctggctctgaggagctgatcgggctgctgaagactgcgcggctgctgcggctggtgcgcgtggcgcggaagctggatcgctactcagagtacggcgcggccgtgctgttcttgctcatgtgcacctttgcgctcatcgcgcactggctagcctgcatctggtacgccatcggcaacatggagcagccacacatggactcacgcatcggctggctgcacaacctgggcgaccagataggcaaaccctacaacagcagcggcctgggcggcccctccatcaaggacaagtatgtgacggcgctctacttcaccttcagcagcctcaccagtgtgggcttcggcaacgtctctcccaacaccaactcagagaagatcttctccatctgcgtcatgctcattggctccctcatgtatgctagcatcttcggcaacgtgtcggccatcatccagcggctgtactcgggcacagcccgctaccacacacagatgctgcgggtgcgggagttcatccgcttccaccagatccccaatcccctgcgccagcgcctcgaggagtacttccagcacgcctggtcctacaccaacggcatcgacatgaacgcggtgctgaagggcttccctgagtgcctgcaggctgacatctgcctgcacctgaaccgctcactgctgcagcactgcaaacccttccgaggggccaccaagggctgccttcgggccctggccatgaagttcaagaccacacatgcaccgccaggggacacactggtgcatgctggggacctgctcaccgccctgtacttcatctcccggggctccatcgagatcctgcggggcgacgtcgtcgtggccatcctggggaagaatgacatctttggggagcctctgaacctgtatgcaaggcctggcaagtcgaacggggatgtgcgggccctcacctactgtgacctacacaagatccatcgggacgacctgctggaggtgctggacatgtaccctgagttctccgaccacttctggtccagcctggagatcaccttcaacctgcgagataccaacatgatcccgggctcccccggcagtacggagttagagggtggcttcagtcggcaacgcaagcgcaagttgtccttccgcaggcgcacggacaaggacacggagcagccaggggaggtgtcggccttggggccgggccgggcgggggcagggccgagtagccggggccggccgggggggccgtggggggagagcccgtccagtggcccctccagccctgagagcagtgaggatgagggcccaggccgcagctccagccccctccgcctggtgcccttctccagccccaggccccccggagagccgccgggtggggagcccctgatggaggactgcgagaagagcagcgacacttgcaaccccctgtcaggcgccttctcaggagtgtccaacattttcagcttctggggggacagtcggggccgccagtaccaggagctccctcgatgccccgcccccacccccagcctcctcaacatccccctctccagcccgggtcggcggccccggggcgacgtggagagcaggctggatgccctccagcgccagctcaacaggctggagacccggctgagtgcagacatggccactgtcctgcagctgctacagaggcagatgacgctggtcccgcccgcctacagtgctgtgaccaccccggggcctggccccacttccacatccccgctgttgcccgtcagccccctccccaccctcaccttggactcgctttctcaggtttcccagttcatggcgtgtgaggagctgcccccgggggccccagagcttccccaagaaggccccacacgacgcctctccctaccgggccagctgggggccctcacctcccagcccctgcacagacacggctcggacccgggcagttagtggggctgcccagtgtggacacgtggctcacccagggatcaaggcgctgctgggccgctccccttggaggccctgctcaggaggccctgaccgtggaaggggagaggaactcgaaagcacagctcctcccccagcccttgggaccatcttctcctgcagtcccctgggccccagtgagaggggcaggggcagggccggcagtaggtggggcctgtggtccccccactgccctgagggcattagctggtctaactgcccggaggcacccggccctgggccttaggcacctcaaggacttttctgctatttactgctcttattgttaaggataataattaaggatcatatgaataattaatgaagatgctgatgactatgaataataaataattatcctgaggaga

SEQ ID NO: 973 - DNA, 3884 bp, Homo sapiens
  source 1..3884: mol_type = genomic DNA
  misc_feature 1..3884: note = cDNA of KCNH2 gene SNP c.754C>G (p.Arg252Gly)
atgccggtgcggaggggccacgtcgcgccgcagaacaccttcctggacaccatcatccgcaagtttgagggccagagccgtaagttcatcatcgccaacgctcgggtggagaactgcgccgtcatctactgcaacgacggcttctgcgagctgtgcggctactcgcgggccgaggtgatgcagcgaccctgcacctgcgacttcctgcacgggccgcgcacgcagcgccgcgctgccgcgcagatcgcgcaggcactgctgggcgccgaggagcgcaaagtggaaatcgccttctaccggaaagatgggagctgcttcctatgtctggtggatgtggtgcccgtgaagaacgaggatggggctgtcatcatgttcatcctcaatttcgaggtggtgatggagaaggacatggtggggtccccggctcatgacaccaaccaccggggcccccccaccagctggctggccccaggccgcgccaagaccttccgcctgaagctgcccgcgctgctggcgctgacggcccgggagtcgtcggtgcggtcgggcggcgcgggcggcgcgggcgccccgggggccgtggtggtggacgtggacctgacgcccgcggcacccagcagcgagtcgctggccctggacgaagtgacagccatggacaaccacgtggcagggctcgggcccgcggaggagcggcgtgcgctggtgggtcccggctctccgccccgcagcgcgcccggccagctcccatcgcccggggcgcacagcctcaaccccgacgcctcgggctccagctgcagcctggcccggacgcgctcccgagaaagctgcgccagcgtgcgccgcgcctcgtcggccgacgacatcgaggccatgcgcgccggggtgctgcccccgccaccgcgccacgccagcaccggggccatgcacccactgcgcagcggcttgctcaactccacctcggactccgacctcgtgcgctaccgcaccattagcaagattccccaaatcaccctcaactttgtggacctcaagggcgaccccttcttggcttcgcccaccagtgaccgtgagatcatagcacctaagataaaggagcgaacccacaatgtcactgagaaggtcacccaggtcctgtccctgggcgccgacgtgctgcctgagtacaagctgcaggcaccgcgcatccaccgctggaccatcctgcattacagccccttcaaggccgtgtgggactggctcatcctgctgctggtcatctacacggctgtcttcacaccctactcggctgccttcctgctgaaggagacggaagaaggcccgcctgctaccgagtgtggctacgcctgccagccgctggctgtggtggacctcatcgtggacatcatgttcattgtggacatcctcatcaacttccgcaccacctacgtcaatgccaacgaggaggtggtcagccaccccggccgcatcgccgtccactacttcaagggctggttcctcatcgacatggtggccgccatccccttcgacctgctcatcttcggctctggctctgaggagctgatcgggctgctgaagactgcgcggctgctgcggctggtgcgcgtggcgcggaagctggatcgctactcagagtacggcgcggccgtgctgttcttgctcatgtgcacctttgcgctcatcgcgcactggctagcctgcatctggtacgccatcggcaacatggagcagccacacatggactcacgcatcggctggctgcacaacctgggcgaccagataggcaaaccctacaacagcagcggcctgggcggcccctccatcaaggacaagtatgtgacggcgctctacttcaccttcagcagcctcaccagtgtgggcttcggcaacgtctctcccaacaccaactcagagaagatcttctccatctgcgtcatgctcattggctccctcatgtatgctagcatcttcggcaacgtgtcggccatcatccagcggctgtactcgggcacagcccgctaccacacacagatgctgcgggtgcgggagttcatccgcttccaccagatccccaatcccctgcgccagcgcctcgaggagtacttccagcacgcctggtcctacaccaacggcatcgacatgaacgcggtgctgaagggcttccctgagtgcctgcaggctgacatctgcctgcacctgaaccgctcactgctgcagcactgcaaacccttccgaggggccaccaagggctgccttcgggccctggccatgaagttcaagaccacacatgcaccgccaggggacacactggtgcatgctggggacctgctcaccgccctgtacttcatctcccggggctccatcgagatcctgcggggcgacgtcgtcgtggccatcctggggaagaatgacatctttggggagcctctgaacctgtatgcaaggcctggcaagtcgaacggggatgtgcgggccctcacctactgtgacctacacaagatccatcgggacgacctgctggaggtgctggacatgtaccctgagttctccgaccacttctggtccagcctggagatcaccttcaacctgcgagataccaacatgatcccgggctcccccggcagtacggagttagagggtggcttcagtcggcaacgcaagcgcaagttgtccttccgcaggcgcacggacaaggacacggagcagccaggggaggtgtcggccttggggccgggccgggcgggggcagggccgagtagccggggccggccgggggggccgtggggggagagcccgtccagtggcccctccagccctgagagcagtgaggatgagggcccaggccgcagctccagccccctccgcctggtgcccttctccagccccaggccccccggagagccgccgggtggggagcccctgatggaggactgcgagaagagcagcgacacttgcaaccccctgtcaggcgccttctcaggagtgtccaacattttcagcttctggggggacagtcggggccgccagtaccaggagctccctcgatgccccgcccccacccccagcctcctcaacatccccctctccagcccgggtcggcggccccggggcgacgtggagagcaggctggatgccctccagcgccagctcaacaggctggagacccggctgagtgcagacatggccactgtcctgcagctgctacagaggcagatgacgctggtcccgcccgcctacagtgctgtgaccaccccggggcctggccccacttccacatccccgctgttgcccgtcagccccctccccaccctcaccttggactcgctttctcaggtttcccagttcatggcgtgtgaggagctgcccccgggggccccagagcttccccaagaaggccccacacgacgcctctccctaccgggccagctgggggccctcacctcccagcccctgcacagacacggctcggacccgggcagttagtggggctgcccagtgtggacacgtggctcacccagggatcaaggcgctgctgggccgctccccttggaggccctgctcaggaggccctgaccgtggaaggggagaggaactcgaaagcacagctcctcccccagcccttgggaccatcttctcctgcagtcccctgggccccagtgagaggggcaggggcagggccggcagtaggtggggcctgtggtccccccactgccctgagggcattagctggtctaactgcccggaggcacccggccctgggccttaggcacctcaaggacttttctgctatttactgctcttattgttaaggataataattaaggatcatatgaataattaatgaagatgctgatgactatgaataataaataattatcctgaggaga

SEQ ID NO: 974 - DNA, 3884 bp, Homo sapiens
  source 1..3884: mol_type = genomic DNA
  misc_feature 1..3884: note = cDNA of KCNH2 gene SNP c.755G>A (p.Arg252Gln)
atgccggtgcggaggggccacgtcgcgccgcagaacaccttcctggacaccatcatccgcaagtttgagggccagagccgtaagttcatcatcgccaacgctcgggtggagaactgcgccgtcatctactgcaacgacggcttctgcgagctgtgcggctactcgcgggccgaggtgatgcagcgaccctgcacctgcgacttcctgcacgggccgcgcacgcagcgccgcgctgccgcgcagatcgcgcaggcactgctgggcgccgaggagcgcaaagtggaaatcgccttctaccggaaagatgggagctgcttcctatgtctggtggatgtggtgcccgtgaagaacgaggatggggctgtcatcatgttcatcctcaatttcgaggtggtgatggagaaggacatggtggggtccccggctcatgacaccaaccaccggggcccccccaccagctggctggccccaggccgcgccaagaccttccgcctgaagctgcccgcgctgctggcgctgacggcccgggagtcgtcggtgcggtcgggcggcgcgggcggcgcgggcgccccgggggccgtggtggtggacgtggacctgacgcccgcggcacccagcagcgagtcgctggccctggacgaagtgacagccatggacaaccacgtggcagggctcgggcccgcggaggagcggcgtgcgctggtgggtcccggctctccgccccgcagcgcgcccggccagctcccatcgccccaggcgcacagcctcaaccccgacgcctcgggctccagctgcagcctggcccggacgcgctcccgagaaagctgcgccagcgtgcgccgcgcctcgtcggccgacgacatcgaggccatgcgcgccggggtgctgcccccgccaccgcgccacgccagcaccggggccatgcacccactgcgcagcggcttgctcaactccacctcggactccgacctcgtgcgctaccgcaccattagcaagattccccaaatcaccctcaactttgtggacctcaagggcgaccccttcttggcttcgcccaccagtgaccgtgagatcatagcacctaagataaaggagcgaacccacaatgtcactgagaaggtcacccaggtcctgtccctgggcgccgacgtgctgcctgagtacaagctgcaggcaccgcgcatccaccgctggaccatcctgcattacagccccttcaaggccgtgtgggactggctcatcctgctgctggtcatctacacggctgtcttcacaccctactcggctgccttcctgctgaaggagacggaagaaggcccgcctgctaccgagtgtggctacgcctgccagccgctggctgtggtggacctcatcgtggacatcatgttcattgtggacatcctcatcaacttccgcaccacctacgtcaatgccaacgaggaggtggtcagccaccccggccgcatcgccgtccactacttcaagggctggttcctcatcgacatggtggccgccatccccttcgacctgctcatcttcggctctggctctgaggagctgatcgggctgctgaagactgcgcggctgctgcggctggtgcgcgtggcgcggaagctggatcgctactcagagtacggcgcggccgtgctgttcttgctcatgtgcacctttgcgctcatcgcgcactggctagcctgcatctggtacgccatcggcaacatggagcagccacacatggactcacgcatcggctggctgcacaacctgggcgaccagataggcaaaccctacaacagcagcggcctgggcggcccctccatcaaggacaagtatgtgacggcgctctacttcaccttcagcagcctcaccagtgtgggcttcggcaacgtctctcccaacaccaactcagagaagatcttctccatctgcgtcatgctcattggctccctcatgtatgctagcatcttcggcaacgtgtcggccatcatccagcggctgtactcgggcacagcccgctaccacacacagatgctgcgggtgcgggagttcatccgcttccaccagatccccaatcccctgcgccagcgcctcgaggagtacttccagcacgcctggtcctacaccaacggcatcgacatgaacgcggtgctgaagggcttccctgagtgcctgcaggctgacatctgcctgcacctgaaccgctcactgctgcagcactgcaaacccttccgaggggccaccaagggctgccttcgggccctggccatgaagttcaagaccacacatgcaccgccaggggacacactggtgcatgctggggacctgctcaccgccctgtacttcatctcccggggctccatcgagatcctgcggggcgacgtcgtcgtggccatcctggggaagaatgacatctttggggagcctctgaacctgtatgcaaggcctggcaagtcgaacggggatgtgcgggccctcacctactgtgacctacacaagatccatcgggacgacctgctggaggtgctggacatgtaccctgagttctccgaccacttctggtccagcctggagatcaccttcaacctgcgagataccaacatgatcccgggctcccccggcagtacggagttagagggtggcttcagtcggcaacgcaagcgcaagttgtccttccgcaggcgcacggacaaggacacggagcagccaggggaggtgtcggccttggggccgggccgggcgggggcagggccgagtagccggggccggccgggggggccgtggggggagagcccgtccagtggcccctccagccctgagagcagtgaggatgagggcccaggccgcagctccagccccctccgcctggtgcccttctccagccccaggccccccggagagccgccgggtggggagcccctgatggaggactgcgagaagagcagcgacacttgcaaccccctgtcaggcgccttctcaggagtgtccaacattttcagcttctggggggacagtcggggccgccagtaccaggagctccctcgatgccccgcccccacccccagcctcctcaacatccccctctccagcccgggtcggcggccccggggcgacgtggagagcaggctggatgccctccagcgccagctcaacaggctggagacccggctgagtgcagacatggccactgtcctgcagctgctacagaggcagatgacgctggtcccgcccgcctacagtgctgtgaccaccccggggcctggccccacttccacatccccgctgttgcccgtcagccccctccccaccctcaccttggactcgctttctcaggtttcccagttcatggcgtgtgaggagctgcccccgggggccccagagcttccccaagaaggccccacacgacgcctctccctaccgggccagctgggggccctcacctcccagcccctgcacagacacggctcggacccgggcagttagtggggctgcccagtgtggacacgtggctcacccagggatcaaggcgctgctgggccgctccccttggaggccctgctcaggaggccctgaccgtggaaggggagaggaactcgaaagcacagctcctcccccagcccttgggaccatcttctcctgcagtcccctgggccccagtgagaggggcaggggcagggccggcagtaggtggggcctgtggtccccccactgccctgagggcattagctggtctaactgcccggaggcacccggccctgggccttaggcacctcaaggacttttctgctatttactgctcttattgttaaggataataattaaggatcatatgaataattaatgaagatgctgatgactatgaataataaataattatcctgaggaga

SEQ ID NO: 975 - DNA, 3884 bp, Homo sapiens
  source 1..3884: mol_type = genomic DNA
  misc_feature 1..3884: note = cDNA of KCNH2 gene SNP c.758C>G (p.Ala253Gly)
atgccggtgcggaggggccacgtcgcgccgcagaacaccttcctggacaccatcatccgcaagtttgagggccagagccgtaagttcatcatcgccaacgctcgggtggagaactgcgccgtcatctactgcaacgacggcttctgcgagctgtgcggctactcgcgggccgaggtgatgcagcgaccctgcacctgcgacttcctgcacgggccgcgcacgcagcgccgcgctgccgcgcagatcgcgcaggcactgctgggcgccgaggagcgcaaagtggaaatcgccttctaccggaaagatgggagctgcttcctatgtctggtggatgtggtgcccgtgaagaacgaggatggggctgtcatcatgttcatcctcaatttcgaggtggtgatggagaaggacatggtggggtccccggctcatgacaccaaccaccggggcccccccaccagctggctggccccaggccgcgccaagaccttccgcctgaagctgcccgcgctgctggcgctgacggcccgggagtcgtcggtgcggtcgggcggcgcgggcggcgcgggcgccccgggggccgtggtggtggacgtggacctgacgcccgcggcacccagcagcgagtcgctggccctggacgaagtgacagccatggacaaccacgtggcagggctcgggcccgcggaggagcggcgtgcgctggtgggtcccggctctccgccccgcagcgcgcccggccagctcccatcgccccgggggcacagcctcaaccccgacgcctcgggctccagctgcagcctggcccggacgcgctcccgagaaagctgcgccagcgtgcgccgcgcctcgtcggccgacgacatcgaggccatgcgcgccggggtgctgcccccgccaccgcgccacgccagcaccggggccatgcacccactgcgcagcggcttgctcaactccacctcggactccgacctcgtgcgctaccgcaccattagcaagattccccaaatcaccctcaactttgtggacctcaagggcgaccccttcttggcttcgcccaccagtgaccgtgagatcatagcacctaagataaaggagcgaacccacaatgtcactgagaaggtcacccaggtcctgtccctgggcgccgacgtgctgcctgagtacaagctgcaggcaccgcgcatccaccgctggaccatcctgcattacagccccttcaaggccgtgtgggactggctcatcctgctgctggtcatctacacggctgtcttcacaccctactcggctgccttcctgctgaaggagacggaagaaggcccgcctgctaccgagtgtggctacgcctgccagccgctggctgtggtggacctcatcgtggacatcatgttcattgtggacatcctcatcaacttccgcaccacctacgtcaatgccaacgaggaggtggtcagccaccccggccgcatcgccgtccactacttcaagggctggttcctcatcgacatggtggccgccatccccttcgacctgctcatcttcggctctggctctgaggagctgatcgggctgctgaagactgcgcggctgctgcggctggtgcgcgtggcgcggaagctggatcgctactcagagtacggcgcggccgtgctgttcttgctcatgtgcacctttgcgctcatcgcgcactggctagcctgcatctggtacgccatcggcaacatggagcagccacacatggactcacgcatcggctggctgcacaacctgggcgaccagataggcaaaccctacaacagcagcggcctgggcggcccctccatcaaggacaagtatgtgacggcgctctacttcaccttcagcagcctcaccagtgtgggcttcggcaacgtctctcccaacaccaactcagagaagatcttctccatctgcgtcatgctcattggctccctcatgtatgctagcatcttcggcaacgtgtcggccatcatccagcggctgtactcgggcacagcccgctaccacacacagatgctgcgggtgcgggagttcatccgcttccaccagatccccaatcccctgcgccagcgcctcgaggagtacttccagcacgcctggtcctacaccaacggcatcgacatgaacgcggtgctgaagggcttccctgagtgcctgcaggctgacatctgcctgcacctgaaccgctcactgctgcagcactgcaaacccttccgaggggccaccaagggctgccttcgggccctggccatgaagttcaagaccacacatgcaccgccaggggacacactggtgcatgctggggacctgctcaccgccctgtacttcatctcccggggctccatcgagatcctgcggggcgacgtcgtcgtggccatcctggggaagaatgacatctttggggagcctctgaacctgtatgcaaggcctggcaagtcgaacggggatgtgcgggccctcacctactgtgacctacacaagatccatcgggacgacctgctggaggtgctggacatgtaccctgagttctccgaccacttctggtccagcctggagatcaccttcaacctgcgagataccaacatgatcccgggctcccccggcagtacggagttagagggtggcttcagtcggcaacgcaagcgcaagttgtccttccgcaggcgcacggacaaggacacggagcagccaggggaggtgtcggccttggggccgggccgggcgggggcagggccgagtagccggggccggccgggggggccgtggggggagagcccgtccagtggcccctccagccctgagagcagtgaggatgagggcccaggccgcagctccagccccctccgcctggtgcccttctccagccccaggccccccggagagccgccgggtggggagcccctgatggaggactgcgagaagagcagcgacacttgcaaccccctgtcaggcgccttctcaggagtgtccaacattttcagcttctggggggacagtcggggccgccagtaccaggagctccctcgatgccccgcccccacccccagcctcctcaacatccccctctccagcccgggtcggcggccccggggcgacgtggagagcaggctggatgccctccagcgccagctcaacaggctggagacccggctgagtgcagacatggccactgtcctgcagctgctacagaggcagatgacgctggtcccgcccgcctacagtgctgtgaccaccccggggcctggccccacttccacatccccgctgttgcccgtcagccccctccccaccctcaccttggactcgctttctcaggtttcccagttcatggcgtgtgaggagctgcccccgggggccccagagcttccccaagaaggccccacacgacgcctctccctaccgggccagctgggggccctcacctcccagcccctgcacagacacggctcggacccgggcagttagtggggctgcccagtgtggacacgtggctcacccagggatcaaggcgctgctgggccgctccccttggaggccctgctcaggaggccctgaccgtggaaggggagaggaactcgaaagcacagctcctcccccagcccttgggaccatcttctcctgcagtcccctgggccccagtgagaggggcaggggcagggccggcagtaggtggggcctgtggtccccccactgccctgagggcattagctggtctaactgcccggaggcacccggccctgggccttaggcacctcaaggacttttctgctatttactgctcttattgttaaggataataattaaggatcatatgaataattaatgaagatgctgatgactatgaataataaataattatcctgaggaga

SEQ ID NO: 976 - DNA, 3884 bp, Homo sapiens
  source 1..3884: mol_type = genomic DNA
  misc_feature 1..3884: note = cDNA of KCNH2 gene SNP c.762C>G (p.His254Gln)
atgccggtgcggaggggccacgtcgcgccgcagaacaccttcctggacaccatcatccgcaagtttgagggccagagccgtaagttcatcatcgccaacgctcgggtggagaactgcgccgtcatctactgcaacgacggcttctgcgagctgtgcggctactcgcgggccgaggtgatgcagcgaccctgcacctgcgacttcctgcacgggccgcgcacgcagcgccgcgctgccgcgcagatcgcgcaggcactgctgggcgccgaggagcgcaaagtggaaatcgccttctaccggaaagatgggagctgcttcctatgtctggtggatgtggtgcccgtgaagaacgaggatggggctgtcatcatgttcatcctcaatttcgaggtggtgatggagaaggacatggtggggtccccggctcatgacaccaaccaccggggcccccccaccagctggctggccccaggccgcgccaagaccttccgcctgaagctgcccgcgctgctggcgctgacggcccgggagtcgtcggtgcggtcgggcggcgcgggcggcgcgggcgccccgggggccgtggtggtggacgtggacctgacgcccgcggcacccagcagcgagtcgctggccctggacgaagtgacagccatggacaaccacgtggcagggctcgggcccgcggaggagcggcgtgcgctggtgggtcccggctctccgccccgcagcgcgcccggccagctcccatcgccccgggcgcagagcctcaaccccgacgcctcgggctccagctgcagcctggcccggacgcgctcccgagaaagctgcgccagcgtgcgccgcgcctcgtcggccgacgacatcgaggccatgcgcgccggggtgctgcccccgccaccgcgccacgccagcaccggggccatgcacccactgcgcagcggcttgctcaactccacctcggactccgacctcgtgcgctaccgcaccattagcaagattccccaaatcaccctcaactttgtggacctcaagggcgaccccttcttggcttcgcccaccagtgaccgtgagatcatagcacctaagataaaggagcgaacccacaatgtcactgagaaggtcacccaggtcctgtccctgggcgccgacgtgctgcctgagtacaagctgcaggcaccgcgcatccaccgctggaccatcctgcattacagccccttcaaggccgtgtgggactggctcatcctgctgctggtcatctacacggctgtcttcacaccctactcggctgccttcctgctgaaggagacggaagaaggcccgcctgctaccgagtgtggctacgcctgccagccgctggctgtggtggacctcatcgtggacatcatgttcattgtggacatcctcatcaacttccgcaccacctacgtcaatgccaacgaggaggtggtcagccaccccggccgcatcgccgtccactacttcaagggctggttcctcatcgacatggtggccgccatccccttcgacctgctcatcttcggctctggctctgaggagctgatcgggctgctgaagactgcgcggctgctgcggctggtgcgcgtggcgcggaagctggatcgctactcagagtacggcgcggccgtgctgttcttgctcatgtgcacctttgcgctcatcgcgcactggctagcctgcatctggtacgccatcggcaacatggagcagccacacatggactcacgcatcggctggctgcacaacctgggcgaccagataggcaaaccctacaacagcagcggcctgggcggcccctccatcaaggacaagtatgtgacggcgctctacttcaccttcagcagcctcaccagtgtgggcttcggcaacgtctctcccaacaccaactcagagaagatcttctccatctgcgtcatgctcattggctccctcatgtatgctagcatcttcggcaacgtgtcggccatcatccagcggctgtactcgggcacagcccgctaccacacacagatgctgcgggtgcgggagttcatccgcttccaccagatccccaatcccctgcgccagcgcctcgaggagtacttccagcacgcctggtcctacaccaacggcatcgacatgaacgcggtgctgaagggcttccctgagtgcctgcaggctgacatctgcctgcacctgaaccgctcactgctgcagcactgcaaacccttccgaggggccaccaagggctgccttcgggccctggccatgaagttcaagaccacacatgcaccgccaggggacacactggtgcatgctggggacctgctcaccgccctgtacttcatctcccggggctccatcgagatcctgcggggcgacgtcgtcgtggccatcctggggaagaatgacatctttggggagcctctgaacctgtatgcaaggcctggcaagtcgaacggggatgtgcgggccctcacctactgtgacctacacaagatccatcgggacgacctgctggaggtgctggacatgtaccctgagttctccgaccacttctggtccagcctggagatcaccttcaacctgcgagataccaacatgatcccgggctcccccggcagtacggagttagagggtggcttcagtcggcaacgcaagcgcaagttgtccttccgcaggcgcacggacaaggacacggagcagccaggggaggtgtcggccttggggccgggccgggcgggggcagggccgagtagccggggccggccgggggggccgtggggggagagcccgtccagtggcccctccagccctgagagcagtgaggatgagggcccaggccgcagctccagccccctccgcctggtgcccttctccagccccaggccccccggagagccgccgggtggggagcccctgatggaggactgcgagaagagcagcgacacttgcaaccccctgtcaggcgccttctcaggagtgtccaacattttcagcttctggggggacagtcggggccgccagtaccaggagctccctcgatgccccgcccccacccccagcctcctcaacatccccctctccagcccgggtcggcggccccggggcgacgtggagagcaggctggatgccctccagcgccagctcaacaggctggagacccggctgagtgcagacatggccactgtcctgcagctgctacagaggcagatgacgctggtcccgcccgcctacagtgctgtgaccaccccggggcctggccccacttccacatccccgctgttgcccgtcagccccctccccaccctcaccttggactcgctttctcaggtttcccagttcatggcgtgtgaggagctgcccccgggggccccagagcttccccaagaaggccccacacgacgcctctccctaccgggccagctgggggccctcacctcccagcccctgcacagacacggctcggacccgggcagttagtggggctgcccagtgtggacacgtggctcacccagggatcaaggcgctgctgggccgctccccttggaggccctgctcaggaggccctgaccgtggaaggggagaggaactcgaaagcacagctcctcccccagcccttgggaccatcttctcctgcagtcccctgggccccagtgagaggggcaggggcagggccggcagtaggtggggcctgtggtccccccactgccctgagggcattagctggtctaactgcccggaggcacccggccctgggccttaggcacctcaaggacttttctgctatttactgctcttattgttaaggataataattaaggatcatatgaataattaatgaagatgctgatgactatgaataataaataattatcctgaggaga

SEQ ID NO: 977 - DNA, 3884 bp, Homo sapiens
  source 1..3884: mol_type = genomic DNA
  misc_feature 1..3884: note = cDNA of KCNH2 gene SNP c.769A>C (p.Asn257His)
atgccggtgcggaggggccacgtcgcgccgcagaacaccttcctggacaccatcatccgcaagtttgagggccagagccgtaagttcatcatcgccaacgctcgggtggagaactgcgccgtcatctactgcaacgacggcttctgcgagctgtgcggctactcgcgggccgaggtgatgcagcgaccctgcacctgcgacttcctgcacgggccgcgcacgcagcgccgcgctgccgcgcagatcgcgcaggcactgctgggcgccgaggagcgcaaagtggaaatcgccttctaccggaaagatgggagctgcttcctatgtctggtggatgtggtgcccgtgaagaacgaggatggggctgtcatcatgttcatcctcaatttcgaggtggtgatggagaaggacatggtggggtccccggctcatgacaccaaccaccggggcccccccaccagctggctggccccaggccgcgccaagaccttccgcctgaagctgcccgcgctgctggcgctgacggcccgggagtcgtcggtgcggtcgggcggcgcgggcggcgcgggcgccccgggggccgtggtggtggacgtggacctgacgcccgcggcacccagcagcgagtcgctggccctggacgaagtgacagccatggacaaccacgtggcagggctcgggcccgcggaggagcggcgtgcgctggtgggtcccggctctccgccccgcagcgcgcccggccagctcccatcgccccgggcgcacagcctccaccccgacgcctcgggctccagctgcagcctggcccggacgcgctcccgagaaagctgcgccagcgtgcgccgcgcctcgtcggccgacgacatcgaggccatgcgcgccggggtgctgcccccgccaccgcgccacgccagcaccggggccatgcacccactgcgcagcggcttgctcaactccacctcggactccgacctcgtgcgctaccgcaccattagcaagattccccaaatcaccctcaactttgtggacctcaagggcgaccccttcttggcttcgcccaccagtgaccgtgagatcatagcacctaagataaaggagcgaacccacaatgtcactgagaaggtcacccaggtcctgtccctgggcgccgacgtgctgcctgagtacaagctgcaggcaccgcgcatccaccgctggaccatcctgcattacagccccttcaaggccgtgtgggactggctcatcctgctgctggtcatctacacggctgtcttcacaccctactcggctgccttcctgctgaaggagacggaagaaggcccgcctgctaccgagtgtggctacgcctgccagccgctggctgtggtggacctcatcgtggacatcatgttcattgtggacatcctcatcaacttccgcaccacctacgtcaatgccaacgaggaggtggtcagccaccccggccgcatcgccgtccactacttcaagggctggttcctcatcgacatggtggccgccatccccttcgacctgctcatcttcggctctggctctgaggagctgatcgggctgctgaagactgcgcggctgctgcggctggtgcgcgtggcgcggaagctggatcgctactcagagtacggcgcggccgtgctgttcttgctcatgtgcacctttgcgctcatcgcgcactggctagcctgcatctggtacgccatcggcaacatggagcagccacacatggactcacgcatcggctggctgcacaacctgggcgaccagataggcaaaccctacaacagcagcggcctgggcggcccctccatcaaggacaagtatgtgacggcgctctacttcaccttcagcagcctcaccagtgtgggcttcggcaacgtctctcccaacaccaactcagagaagatcttctccatctgcgtcatgctcattggctccctcatgtatgctagcatcttcggcaacgtgtcggccatcatccagcggctgtactcgggcacagcccgctaccacacacagatgctgcgggtgcgggagttcatccgcttccaccagatccccaatcccctgcgccagcgcctcgaggagtacttccagcacgcctggtcctacaccaacggcatcgacatgaacgcggtgctgaagggcttccctgagtgcctgcaggctgacatctgcctgcacctgaaccgctcactgctgcagcactgcaaacccttccgaggggccaccaagggctgccttcgggccctggccatgaagttcaagaccacacatgcaccgccaggggacacactggtgcatgctggggacctgctcaccgccctgtacttcatctcccggggctccatcgagatcctgcggggcgacgtcgtcgtggccatcctggggaagaatgacatctttggggagcctctgaacctgtatgcaaggcctggcaagtcgaacggggatgtgcgggccctcacctactgtgacctacacaagatccatcgggacgacctgctggaggtgctggacatgtaccctgagttctccgaccacttctggtccagcctggagatcaccttcaacctgcgagataccaacatgatcccgggctcccccggcagtacggagttagagggtggcttcagtcggcaacgcaagcgcaagttgtccttccgcaggcgcacggacaaggacacggagcagccaggggaggtgtcggccttggggccgggccgggcgggggcagggccgagtagccggggccggccgggggggccgtggggggagagcccgtccagtggcccctccagccctgagagcagtgaggatgagggcccaggccgcagctccagccccctccgcctggtgcccttctccagccccaggccccccggagagccgccgggtggggagcccctgatggaggactgcgagaagagcagcgacacttgcaaccccctgtcaggcgccttctcaggagtgtccaacattttcagcttctggggggacagtcggggccgccagtaccaggagctccctcgatgccccgcccccacccccagcctcctcaacatccccctctccagcccgggtcggcggccccggggcgacgtggagagcaggctggatgccctccagcgccagctcaacaggctggagacccggctgagtgcagacatggccactgtcctgcagctgctacagaggcagatgacgctggtcccgcccgcctacagtgctgtgaccaccccggggcctggccccacttccacatccccgctgttgcccgtcagccccctccccaccctcaccttggactcgctttctcaggtttcccagttcatggcgtgtgaggagctgcccccgggggccccagagcttccccaagaaggccccacacgacgcctctccctaccgggccagctgggggccctcacctcccagcccctgcacagacacggctcggacccgggcagttagtggggctgcccagtgtggacacgtggctcacccagggatcaaggcgctgctgggccgctccccttggaggccctgctcaggaggccctgaccgtggaaggggagaggaactcgaaagcacagctcctcccccagcccttgggaccatcttctcctgcagtcccctgggccccagtgagaggggcaggggcagggccggcagtaggtggggcctgtggtccccccactgccctgagggcattagctggtctaactgcccggaggcacccggccctgggccttaggcacctcaaggacttttctgctatttactgctcttattgttaaggataataattaaggatcatatgaataattaatgaagatgctgatgactatgaataataaataattatcctgaggaga

SEQ ID NO: 978 - DNA, 3884 bp, Homo sapiens
  source 1..3884: mol_type = genomic DNA
  misc_feature 1..3884: note = cDNA of KCNH2 gene SNP c.76A>G (p.Ser26Gly)
atgccggtgcggaggggccacgtcgcgccgcagaacaccttcctggacaccatcatccgcaagtttgagggccagggccgtaagttcatcatcgccaacgctcgggtggagaactgcgccgtcatctactgcaacgacggcttctgcgagctgtgcggctactcgcgggccgaggtgatgcagcgaccctgcacctgcgacttcctgcacgggccgcgcacgcagcgccgcgctgccgcgcagatcgcgcaggcactgctgggcgccgaggagcgcaaagtggaaatcgccttctaccggaaagatgggagctgcttcctatgtctggtggatgtggtgcccgtgaagaacgaggatggggctgtcatcatgttcatcctcaatttcgaggtggtgatggagaaggacatggtggggtccccggctcatgacaccaaccaccggggcccccccaccagctggctggccccaggccgcgccaagaccttccgcctgaagctgcccgcgctgctggcgctgacggcccgggagtcgtcggtgcggtcgggcggcgcgggcggcgcgggcgccccgggggccgtggtggtggacgtggacctgacgcccgcggcacccagcagcgagtcgctggccctggacgaagtgacagccatggacaaccacgtggcagggctcgggcccgcggaggagcggcgtgcgctggtgggtcccggctctccgccccgcagcgcgcccggccagctcccatcgccccgggcgcacagcctcaaccccgacgcctcgggctccagctgcagcctggcccggacgcgctcccgagaaagctgcgccagcgtgcgccgcgcctcgtcggccgacgacatcgaggccatgcgcgccggggtgctgcccccgccaccgcgccacgccagcaccggggccatgcacccactgcgcagcggcttgctcaactccacctcggactccgacctcgtgcgctaccgcaccattagcaagattccccaaatcaccctcaactttgtggacctcaagggcgaccccttcttggcttcgcccaccagtgaccgtgagatcatagcacctaagataaaggagcgaacccacaatgtcactgagaaggtcacccaggtcctgtccctgggcgccgacgtgctgcctgagtacaagctgcaggcaccgcgcatccaccgctggaccatcctgcattacagccccttcaaggccgtgtgggactggctcatcctgctgctggtcatctacacggctgtcttcacaccctactcggctgccttcctgctgaaggagacggaagaaggcccgcctgctaccgagtgtggctacgcctgccagccgctggctgtggtggacctcatcgtggacatcatgttcattgtggacatcctcatcaacttccgcaccacctacgtcaatgccaacgaggaggtggtcagccaccccggccgcatcgccgtccactacttcaagggctggttcctcatcgacatggtggccgccatccccttcgacctgctcatcttcggctctggctctgaggagctgatcgggctgctgaagactgcgcggctgctgcggctggtgcgcgtggcgcggaagctggatcgctactcagagtacggcgcggccgtgctgttcttgctcatgtgcacctttgcgctcatcgcgcactggctagcctgcatctggtacgccatcggcaacatggagcagccacacatggactcacgcatcggctggctgcacaacctgggcgaccagataggcaaaccctacaacagcagcggcctgggcggcccctccatcaaggacaagtatgtgacggcgctctacttcaccttcagcagcctcaccagtgtgggcttcggcaacgtctctcccaacaccaactcagagaagatcttctccatctgcgtcatgctcattggctccctcatgtatgctagcatcttcggcaacgtgtcggccatcatccagcggctgtactcgggcacagcccgctaccacacacagatgctgcgggtgcgggagttcatccgcttccaccagatccccaatcccctgcgccagcgcctcgaggagtacttccagcacgcctggtcctacaccaacggcatcgacatgaacgcggtgctgaagggcttccctgagtgcctgcaggctgacatctgcctgcacctgaaccgctcactgctgcagcactgcaaacccttccgaggggccaccaagggctgccttcgggccctggccatgaagttcaagaccacacatgcaccgccaggggacacactggtgcatgctggggacctgctcaccgccctgtacttcatctcccggggctccatcgagatcctgcggggcgacgtcgtcgtggccatcctggggaagaatgacatctttggggagcctctgaacctgtatgcaaggcctggcaagtcgaacggggatgtgcgggccctcacctactgtgacctacacaagatccatcgggacgacctgctggaggtgctggacatgtaccctgagttctccgaccacttctggtccagcctggagatcaccttcaacctgcgagataccaacatgatcccgggctcccccggcagtacggagttagagggtggcttcagtcggcaacgcaagcgcaagttgtccttccgcaggcgcacggacaaggacacggagcagccaggggaggtgtcggccttggggccgggccgggcgggggcagggccgagtagccggggccggccgggggggccgtggggggagagcccgtccagtggcccctccagccctgagagcagtgaggatgagggcccaggccgcagctccagccccctccgcctggtgcccttctccagccccaggccccccggagagccgccgggtggggagcccctgatggaggactgcgagaagagcagcgacacttgcaaccccctgtcaggcgccttctcaggagtgtccaacattttcagcttctggggggacagtcggggccgccagtaccaggagctccctcgatgccccgcccccacccccagcctcctcaacatccccctctccagcccgggtcggcggccccggggcgacgtggagagcaggctggatgccctccagcgccagctcaacaggctggagacccggctgagtgcagacatggccactgtcctgcagctgctacagaggcagatgacgctggtcccgcccgcctacagtgctgtgaccaccccggggcctggccccacttccacatccccgctgttgcccgtcagccccctccccaccctcaccttggactcgctttctcaggtttcccagttcatggcgtgtgaggagctgcccccgggggccccagagcttccccaagaaggccccacacgacgcctctccctaccgggccagctgggggccctcacctcccagcccctgcacagacacggctcggacccgggcagttagtggggctgcccagtgtggacacgtggctcacccagggatcaaggcgctgctgggccgctccccttggaggccctgctcaggaggccctgaccgtggaaggggagaggaactcgaaagcacagctcctcccccagcccttgggaccatcttctcctgcagtcccctgggccccagtgagaggggcaggggcagggccggcagtaggtggggcctgtggtccccccactgccctgagggcattagctggtctaactgcccggaggcacccggccctgggccttaggcacctcaaggacttttctgctatttactgctcttattgttaaggataataattaaggatcatatgaataattaatgaagatgctgatgactatgaataataaataattatcctgaggaga

SEQ ID NO: 979 - DNA, 3884 bp, Homo sapiens
  source 1..3884: mol_type = genomic DNA
  misc_feature 1..3884: note = cDNA of KCNH2 gene SNP c.772C>T (p.Pro258Ser)
atgccggtgcggaggggccacgtcgcgccgcagaacaccttcctggacaccatcatccgcaagtttgagggccagagccgtaagttcatcatcgccaacgctcgggtggagaactgcgccgtcatctactgcaacgacggcttctgcgagctgtgcggctactcgcgggccgaggtgatgcagcgaccctgcacctgcgacttcctgcacgggccgcgcacgcagcgccgcgctgccgcgcagatcgcgcaggcactgctgggcgccgaggagcgcaaagtggaaatcgccttctaccggaaagatgggagctgcttcctatgtctggtggatgtggtgcccgtgaagaacgaggatggggctgtcatcatgttcatcctcaatttcgaggtggtgatggagaaggacatggtggggtccccggctcatgacaccaaccaccggggcccccccaccagctggctggccccaggccgcgccaagaccttccgcctgaagctgcccgcgctgctggcgctgacggcccgggagtcgtcggtgcggtcgggcggcgcgggcggcgcgggcgccccgggggccgtggtggtggacgtggacctgacgcccgcggcacccagcagcgagtcgctggccctggacgaagtgacagccatggacaaccacgtggcagggctcgggcccgcggaggagcggcgtgcgctggtgggtcccggctctccgccccgcagcgcgcccggccagctcccatcgccccgggcgcacagcctcaactccgacgcctcgggctccagctgcagcctggcccggacgcgctcccgagaaagctgcgccagcgtgcgccgcgcctcgtcggccgacgacatcgaggccatgcgcgccggggtgctgcccccgccaccgcgccacgccagcaccggggccatgcacccactgcgcagcggcttgctcaactccacctcggactccgacctcgtgcgctaccgcaccattagcaagattccccaaatcaccctcaactttgtggacctcaagggcgaccccttcttggcttcgcccaccagtgaccgtgagatcatagcacctaagataaaggagcgaacccacaatgtcactgagaaggtcacccaggtcctgtccctgggcgccgacgtgctgcctgagtacaagctgcaggcaccgcgcatccaccgctggaccatcctgcattacagccccttcaaggccgtgtgggactggctcatcctgctgctggtcatctacacggctgtcttcacaccctactcggctgccttcctgctgaaggagacggaagaaggcccgcctgctaccgagtgtggctacgcctgccagccgctggctgtggtggacctcatcgtggacatcatgttcattgtggacatcctcatcaacttccgcaccacctacgtcaatgccaacgaggaggtggtcagccaccccggccgcatcgccgtccactacttcaagggctggttcctcatcgacatggtggccgccatccccttcgacctgctcatcttcggctctggctctgaggagctgatcgggctgctgaagactgcgcggctgctgcggctggtgcgcgtggcgcggaagctggatcgctactcagagtacggcgcggccgtgctgttcttgctcatgtgcacctttgcgctcatcgcgcactggctagcctgcatctggtacgccatcggcaacatggagcagccacacatggactcacgcatcggctggctgcacaacctgggcgaccagataggcaaaccctacaacagcagcggcctgggcggcccctccatcaaggacaagtatgtgacggcgctctacttcaccttcagcagcctcaccagtgtgggcttcggcaacgtctctcccaacaccaactcagagaagatcttctccatctgcgtcatgctcattggctccctcatgtatgctagcatcttcggcaacgtgtcggccatcatccagcggctgtactcgggcacagcccgctaccacacacagatgctgcgggtgcgggagttcatccgcttccaccagatccccaatcccctgcgccagcgcctcgaggagtacttccagcacgcctggtcctacaccaacggcatcgacatgaacgcggtgctgaagggcttccctgagtgcctgcaggctgacatctgcctgcacctgaaccgctcactgctgcagcactgcaaacccttccgaggggccaccaagggctgccttcgggccctggccatgaagttcaagaccacacatgcaccgccaggggacacactggtgcatgctggggacctgctcaccgccctgtacttcatctcccggggctccatcgagatcctgcggggcgacgtcgtcgtggccatcctggggaagaatgacatctttggggagcctctgaacctgtatgcaaggcctggcaagtcgaacggggatgtgcgggccctcacctactgtgacctacacaagatccatcgggacgacctgctggaggtgctggacatgtaccctgagttctccgaccacttctggtccagcctggagatcaccttcaacctgcgagataccaacatgatcccgggctcccccggcagtacggagttagagggtggcttcagtcggcaacgcaagcgcaagttgtccttccgcaggcgcacggacaaggacacggagcagccaggggaggtgtcggccttggggccgggccgggcgggggcagggccgagtagccggggccggccgggggggccgtggggggagagcccgtccagtggcccctccagccctgagagcagtgaggatgagggcccaggccgcagctccagccccctccgcctggtgcccttctccagccccaggccccccggagagccgccgggtggggagcccctgatggaggactgcgagaagagcagcgacacttgcaaccccctgtcaggcgccttctcaggagtgtccaacattttcagcttctggggggacagtcggggccgccagtaccaggagctccctcgatgccccgcccccacccccagcctcctcaacatccccctctccagcccgggtcggcggccccggggcgacgtggagagcaggctggatgccctccagcgccagctcaacaggctggagacccggctgagtgcagacatggccactgtcctgcagctgctacagaggcagatgacgctggtcccgcccgcctacagtgctgtgaccaccccggggcctggccccacttccacatccccgctgttgcccgtcagccccctccccaccctcaccttggactcgctttctcaggtttcccagttcatggcgtgtgaggagctgcccccgggggccccagagcttccccaagaaggccccacacgacgcctctccctaccgggccagctgggggccctcacctcccagcccctgcacagacacggctcggacccgggcagttagtggggctgcccagtgtggacacgtggctcacccagggatcaaggcgctgctgggccgctccccttggaggccctgctcaggaggccctgaccgtggaaggggagaggaactcgaaagcacagctcctcccccagcccttgggaccatcttctcctgcagtcccctgggccccagtgagaggggcaggggcagggccggcagtaggtggggcctgtggtccccccactgccctgagggcattagctggtctaactgcccggaggcacccggccctgggccttaggcacctcaaggacttttctgctatttactgctcttattgttaaggataataattaaggatcatatgaataattaatgaagatgctgatgactatgaataataaataattatcctgaggaga

SEQ ID NO: 980 - DNA, 3884 bp, Homo sapiens
  source 1..3884: mol_type = genomic DNA
  misc_feature 1..3884: note = cDNA of KCNH2 gene SNP c.773C>T (p.Pro258Leu)
atgccggtgcggaggggccacgtcgcgccgcagaacaccttcctggacaccatcatccgcaagtttgagggccagagccgtaagttcatcatcgccaacgctcgggtggagaactgcgccgtcatctactgcaacgacggcttctgcgagctgtgcggctactcgcgggccgaggtgatgcagcgaccctgcacctgcgacttcctgcacgggccgcgcacgcagcgccgcgctgccgcgcagatcgcgcaggcactgctgggcgccgaggagcgcaaagtggaaatcgccttctaccggaaagatgggagctgcttcctatgtctggtggatgtggtgcccgtgaagaacgaggatggggctgtcatcatgttcatcctcaatttcgaggtggtgatggagaaggacatggtggggtccccggctcatgacaccaaccaccggggcccccccaccagctggctggccccaggccgcgccaagaccttccgcctgaagctgcccgcgctgctggcgctgacggcccgggagtcgtcggtgcggtcgggcggcgcgggcggcgcgggcgccccgggggccgtggtggtggacgtggacctgacgcccgcggcacccagcagcgagtcgctggccctggacgaagtgacagccatggacaaccacgtggcagggctcgggcccgcggaggagcggcgtgcgctggtgggtcccggctctccgccccgcagcgcgcccggccagctcccatcgccccgggcgcacagcctcaacctcgacgcctcgggctccagctgcagcctggcccggacgcgctcccgagaaagctgcgccagcgtgcgccgcgcctcgtcggccgacgacatcgaggccatgcgcgccggggtgctgcccccgccaccgcgccacgccagcaccggggccatgcacccactgcgcagcggcttgctcaactccacctcggactccgacctcgtgcgctaccgcaccattagcaagattccccaaatcaccctcaactttgtggacctcaagggcgaccccttcttggcttcgcccaccagtgaccgtgagatcatagcacctaagataaaggagcgaacccacaatgtcactgagaaggtcacccaggtcctgtccctgggcgccgacgtgctgcctgagtacaagctgcaggcaccgcgcatccaccgctggaccatcctgcattacagccccttcaaggccgtgtgggactggctcatcctgctgctggtcatctacacggctgtcttcacaccctactcggctgccttcctgctgaaggagacggaagaaggcccgcctgctaccgagtgtggctacgcctgccagccgctggctgtggtggacctcatcgtggacatcatgttcattgtggacatcctcatcaacttccgcaccacctacgtcaatgccaacgaggaggtggtcagccaccccggccgcatcgccgtccactacttcaagggctggttcctcatcgacatggtggccgccatccccttcgacctgctcatcttcggctctggctctgaggagctgatcgggctgctgaagactgcgcggctgctgcggctggtgcgcgtggcgcggaagctggatcgctactcagagtacggcgcggccgtgctgttcttgctcatgtgcacctttgcgctcatcgcgcactggctagcctgcatctggtacgccatcggcaacatggagcagccacacatggactcacgcatcggctggctgcacaacctgggcgaccagataggcaaaccctacaacagcagcggcctgggcggcccctccatcaaggacaagtatgtgacggcgctctacttcaccttcagcagcctcaccagtgtgggcttcggcaacgtctctcccaacaccaactcagagaagatcttctccatctgcgtcatgctcattggctccctcatgtatgctagcatcttcggcaacgtgtcggccatcatccagcggctgtactcgggcacagcccgctaccacacacagatgctgcgggtgcgggagttcatccgcttccaccagatccccaatcccctgcgccagcgcctcgaggagtacttccagcacgcctggtcctacaccaacggcatcgacatgaacgcggtgctgaagggcttccctgagtgcctgcaggctgacatctgcctgcacctgaaccgctcactgctgcagcactgcaaacccttccgaggggccaccaagggctgccttcgggccctggccatgaagttcaagaccacacatgcaccgccaggggacacactggtgcatgctggggacctgctcaccgccctgtacttcatctcccggggctccatcgagatcctgcggggcgacgtcgtcgtggccatcctggggaagaatgacatctttggggagcctctgaacctgtatgcaaggcctggcaagtcgaacggggatgtgcgggccctcacctactgtgacctacacaagatccatcgggacgacctgctggaggtgctggacatgtaccctgagttctccgaccacttctggtccagcctggagatcaccttcaacctgcgagataccaacatgatcccgggctcccccggcagtacggagttagagggtggcttcagtcggcaacgcaagcgcaagttgtccttccgcaggcgcacggacaaggacacggagcagccaggggaggtgtcggccttggggccgggccgggcgggggcagggccgagtagccggggccggccgggggggccgtggggggagagcccgtccagtggcccctccagccctgagagcagtgaggatgagggcccaggccgcagctccagccccctccgcctggtgcccttctccagccccaggccccccggagagccgccgggtggggagcccctgatggaggactgcgagaagagcagcgacacttgcaaccccctgtcaggcgccttctcaggagtgtccaacattttcagcttctggggggacagtcggggccgccagtaccaggagctccctcgatgccccgcccccacccccagcctcctcaacatccccctctccagcccgggtcggcggccccggggcgacgtggagagcaggctggatgccctccagcgccagctcaacaggctggagacccggctgagtgcagacatggccactgtcctgcagctgctacagaggcagatgacgctggtcccgcccgcctacagtgctgtgaccaccccggggcctggccccacttccacatccccgctgttgcccgtcagccccctccccaccctcaccttggactcgctttctcaggtttcccagttcatggcgtgtgaggagctgcccccgggggccccagagcttccccaagaaggccccacacgacgcctctccctaccgggccagctgggggccctcacctcccagcccctgcacagacacggctcggacccgggcagttagtggggctgcccagtgtggacacgtggctcacccagggatcaaggcgctgctgggccgctccccttggaggccctgctcaggaggccctgaccgtggaaggggagaggaactcgaaagcacagctcctcccccagcccttgggaccatcttctcctgcagtcccctgggccccagtgagaggggcaggggcagggccggcagtaggtggggcctgtggtccccccactgccctgagggcattagctggtctaactgcccggaggcacccggccctgggccttaggcacctcaaggacttttctgctatttactgctcttattgttaaggataataattaaggatcatatgaataattaatgaagatgctgatgactatgaataataaataattatcctgaggaga

SEQ ID NO: 981 - DNA, 3884 bp, Homo sapiens
  source 1..3884: mol_type = genomic DNA
  misc_feature 1..3884: note = cDNA of KCNH2 gene SNP c.775G>A (p.Asp259Asn)
atgccggtgcggaggggccacgtcgcgccgcagaacaccttcctggacaccatcatccgcaagtttgagggccagagccgtaagttcatcatcgccaacgctcgggtggagaactgcgccgtcatctactgcaacgacggcttctgcgagctgtgcggctactcgcgggccgaggtgatgcagcgaccctgcacctgcgacttcctgcacgggccgcgcacgcagcgccgcgctgccgcgcagatcgcgcaggcactgctgggcgccgaggagcgcaaagtggaaatcgccttctaccggaaagatgggagctgcttcctatgtctggtggatgtggtgcccgtgaagaacgaggatggggctgtcatcatgttcatcctcaatttcgaggtggtgatggagaaggacatggtggggtccccggctcatgacaccaaccaccggggcccccccaccagctggctggccccaggccgcgccaagaccttccgcctgaagctgcccgcgctgctggcgctgacggcccgggagtcgtcggtgcggtcgggcggcgcgggcggcgcgggcgccccgggggccgtggtggtggacgtggacctgacgcccgcggcacccagcagcgagtcgctggccctggacgaagtgacagccatggacaaccacgtggcagggctcgggcccgcggaggagcggcgtgcgctggtgggtcccggctctccgccccgcagcgcgcccggccagctcccatcgccccgggcgcacagcctcaaccccaacgcctcgggctccagctgcagcctggcccggacgcgctcccgagaaagctgcgccagcgtgcgccgcgcctcgtcggccgacgacatcgaggccatgcgcgccggggtgctgcccccgccaccgcgccacgccagcaccggggccatgcacccactgcgcagcggcttgctcaactccacctcggactccgacctcgtgcgctaccgcaccattagcaagattccccaaatcaccctcaactttgtggacctcaagggcgaccccttcttggcttcgcccaccagtgaccgtgagatcatagcacctaagataaaggagcgaacccacaatgtcactgagaaggtcacccaggtcctgtccctgggcgccgacgtgctgcctgagtacaagctgcaggcaccgcgcatccaccgctggaccatcctgcattacagccccttcaaggccgtgtgggactggctcatcctgctgctggtcatctacacggctgtcttcacaccctactcggctgccttcctgctgaaggagacggaagaaggcccgcctgctaccgagtgtggctacgcctgccagccgctggctgtggtggacctcatcgtggacatcatgttcattgtggacatcctcatcaacttccgcaccacctacgtcaatgccaacgaggaggtggtcagccaccccggccgcatcgccgtccactacttcaagggctggttcctcatcgacatggtggccgccatccccttcgacctgctcatcttcggctctggctctgaggagctgatcgggctgctgaagactgcgcggctgctgcggctggtgcgcgtggcgcggaagctggatcgctactcagagtacggcgcggccgtgctgttcttgctcatgtgcacctttgcgctcatcgcgcactggctagcctgcatctggtacgccatcggcaacatggagcagccacacatggactcacgcatcggctggctgcacaacctgggcgaccagataggcaaaccctacaacagcagcggcctgggcggcccctccatcaaggacaagtatgtgacggcgctctacttcaccttcagcagcctcaccagtgtgggcttcggcaacgtctctcccaacaccaactcagagaagatcttctccatctgcgtcatgctcattggctccctcatgtatgctagcatcttcggcaacgtgtcggccatcatccagcggctgtactcgggcacagcccgctaccacacacagatgctgcgggtgcgggagttcatccgcttccaccagatccccaatcccctgcgccagcgcctcgaggagtacttccagcacgcctggtcctacaccaacggcatcgacatgaacgcggtgctgaagggcttccctgagtgcctgcaggctgacatctgcctgcacctgaaccgctcactgctgcagcactgcaaacccttccgaggggccaccaagggctgccttcgggccctggccatgaagttcaagaccacacatgcaccgccaggggacacactggtgcatgctggggacctgctcaccgccctgtacttcatctcccggggctccatcgagatcctgcggggcgacgtcgtcgtggccatcctggggaagaatgacatctttggggagcctctgaacctgtatgcaaggcctggcaagtcgaacggggatgtgcgggccctcacctactgtgacctacacaagatccatcgggacgacctgctggaggtgctggacatgtaccctgagttctccgaccacttctggtccagcctggagatcaccttcaacctgcgagataccaacatgatcccgggctcccccggcagtacggagttagagggtggcttcagtcggcaacgcaagcgcaagttgtccttccgcaggcgcacggacaaggacacggagcagccaggggaggtgtcggccttggggccgggccgggcgggggcagggccgagtagccggggccggccgggggggccgtggggggagagcccgtccagtggcccctccagccctgagagcagtgaggatgagggcccaggccgcagctccagccccctccgcctggtgcccttctccagccccaggccccccggagagccgccgggtggggagcccctgatggaggactgcgagaagagcagcgacacttgcaaccccctgtcaggcgccttctcaggagtgtccaacattttcagcttctggggggacagtcggggccgccagtaccaggagctccctcgatgccccgcccccacccccagcctcctcaacatccccctctccagcccgggtcggcggccccggggcgacgtggagagcaggctggatgccctccagcgccagctcaacaggctggagacccggctgagtgcagacatggccactgtcctgcagctgctacagaggcagatgacgctggtcccgcccgcctacagtgctgtgaccaccccggggcctggccccacttccacatccccgctgttgcccgtcagccccctccccaccctcaccttggactcgctttctcaggtttcccagttcatggcgtgtgaggagctgcccccgggggccccagagcttccccaagaaggccccacacgacgcctctccctaccgggccagctgggggccctcacctcccagcccctgcacagacacggctcggacccgggcagttagtggggctgcccagtgtggacacgtggctcacccagggatcaaggcgctgctgggccgctccccttggaggccctgctcaggaggccctgaccgtggaaggggagaggaactcgaaagcacagctcctcccccagcccttgggaccatcttctcctgcagtcccctgggccccagtgagaggggcaggggcagggccggcagtaggtggggcctgtggtccccccactgccctgagggcattagctggtctaactgcccggaggcacccggccctgggccttaggcacctcaaggacttttctgctatttactgctcttattgttaaggataataattaaggatcatatgaataattaatgaagatgctgatgactatgaataataaataattatcctgaggaga

SEQ ID NO: 982 - DNA, 3884 bp, Homo sapiens
  source 1..3884: mol_type = genomic DNA
  misc_feature 1..3884: note = cDNA of KCNH2 gene SNP c.778G>C (p.Ala260Pro)
atgccggtgcggaggggccacgtcgcgccgcagaacaccttcctggacaccatcatccgcaagtttgagggccagagccgtaagttcatcatcgccaacgctcgggtggagaactgcgccgtcatctactgcaacgacggcttctgcgagctgtgcggctactcgcgggccgaggtgatgcagcgaccctgcacctgcgacttcctgcacgggccgcgcacgcagcgccgcgctgccgcgcagatcgcgcaggcactgctgggcgccgaggagcgcaaagtggaaatcgccttctaccggaaagatgggagctgcttcctatgtctggtggatgtggtgcccgtgaagaacgaggatggggctgtcatcatgttcatcctcaatttcgaggtggtgatggagaaggacatggtggggtccccggctcatgacaccaaccaccggggcccccccaccagctggctggccccaggccgcgccaagaccttccgcctgaagctgcccgcgctgctggcgctgacggcccgggagtcgtcggtgcggtcgggcggcgcgggcggcgcgggcgccccgggggccgtggtggtggacgtggacctgacgcccgcggcacccagcagcgagtcgctggccctggacgaagtgacagccatggacaaccacgtggcagggctcgggcccgcggaggagcggcgtgcgctggtgggtcccggctctccgccccgcagcgcgcccggccagctcccatcgccccgggcgcacagcctcaaccccgacccctcgggctccagctgcagcctggcccggacgcgctcccgagaaagctgcgccagcgtgcgccgcgcctcgtcggccgacgacatcgaggccatgcgcgccggggtgctgcccccgccaccgcgccacgccagcaccggggccatgcacccactgcgcagcggcttgctcaactccacctcggactccgacctcgtgcgctaccgcaccattagcaagattccccaaatcaccctcaactttgtggacctcaagggcgaccccttcttggcttcgcccaccagtgaccgtgagatcatagcacctaagataaaggagcgaacccacaatgtcactgagaaggtcacccaggtcctgtccctgggcgccgacgtgctgcctgagtacaagctgcaggcaccgcgcatccaccgctggaccatcctgcattacagccccttcaaggccgtgtgggactggctcatcctgctgctggtcatctacacggctgtcttcacaccctactcggctgccttcctgctgaaggagacggaagaaggcccgcctgctaccgagtgtggctacgcctgccagccgctggctgtggtggacctcatcgtggacatcatgttcattgtggacatcctcatcaacttccgcaccacctacgtcaatgccaacgaggaggtggtcagccaccccggccgcatcgccgtccactacttcaagggctggttcctcatcgacatggtggccgccatccccttcgacctgctcatcttcggctctggctctgaggagctgatcgggctgctgaagactgcgcggctgctgcggctggtgcgcgtggcgcggaagctggatcgctactcagagtacggcgcggccgtgctgttcttgctcatgtgcacctttgcgctcatcgcgcactggctagcctgcatctggtacgccatcggcaacatggagcagccacacatggactcacgcatcggctggctgcacaacctgggcgaccagataggcaaaccctacaacagcagcggcctgggcggcccctccatcaaggacaagtatgtgacggcgctctacttcaccttcagcagcctcaccagtgtgggcttcggcaacgtctctcccaacaccaactcagagaagatcttctccatctgcgtcatgctcattggctccctcatgtatgctagcatcttcggcaacgtgtcggccatcatccagcggctgtactcgggcacagcccgctaccacacacagatgctgcgggtgcgggagttcatccgcttccaccagatccccaatcccctgcgccagcgcctcgaggagtacttccagcacgcctggtcctacaccaacggcatcgacatgaacgcggtgctgaagggcttccctgagtgcctgcaggctgacatctgcctgcacctgaaccgctcactgctgcagcactgcaaacccttccgaggggccaccaagggctgccttcgggccctggccatgaagttcaagaccacacatgcaccgccaggggacacactggtgcatgctggggacctgctcaccgccctgtacttcatctcccggggctccatcgagatcctgcggggcgacgtcgtcgtggccatcctggggaagaatgacatctttggggagcctctgaacctgtatgcaaggcctggcaagtcgaacggggatgtgcgggccctcacctactgtgacctacacaagatccatcgggacgacctgctggaggtgctggacatgtaccctgagttctccgaccacttctggtccagcctggagatcaccttcaacctgcgagataccaacatgatcccgggctcccccggcagtacggagttagagggtggcttcagtcggcaacgcaagcgcaagttgtccttccgcaggcgcacggacaaggacacggagcagccaggggaggtgtcggccttggggccgggccgggcgggggcagggccgagtagccggggccggccgggggggccgtggggggagagcccgtccagtggcccctccagccctgagagcagtgaggatgagggcccaggccgcagctccagccccctccgcctggtgcccttctccagccccaggccccccggagagccgccgggtggggagcccctgatggaggactgcgagaagagcagcgacacttgcaaccccctgtcaggcgccttctcaggagtgtccaacattttcagcttctggggggacagtcggggccgccagtaccaggagctccctcgatgccccgcccccacccccagcctcctcaacatccccctctccagcccgggtcggcggccccggggcgacgtggagagcaggctggatgccctccagcgccagctcaacaggctggagacccggctgagtgcagacatggccactgtcctgcagctgctacagaggcagatgacgctggtcccgcccgcctacagtgctgtgaccaccccggggcctggccccacttccacatccccgctgttgcccgtcagccccctccccaccctcaccttggactcgctttctcaggtttcccagttcatggcgtgtgaggagctgcccccgggggccccagagcttccccaagaaggccccacacgacgcctctccctaccgggccagctgggggccctcacctcccagcccctgcacagacacggctcggacccgggcagttagtggggctgcccagtgtggacacgtggctcacccagggatcaaggcgctgctgggccgctccccttggaggccctgctcaggaggccctgaccgtggaaggggagaggaactcgaaagcacagctcctcccccagcccttgggaccatcttctcctgcagtcccctgggccccagtgagaggggcaggggcagggccggcagtaggtggggcctgtggtccccccactgccctgagggcattagctggtctaactgcccggaggcacccggccctgggccttaggcacctcaaggacttttctgctatttactgctcttattgttaaggataataattaaggatcatatgaataattaatgaagatgctgatgactatgaataataaataattatcctgaggaga

SEQ ID NO: 983 - DNA, 3884 bp, Homo sapiens
  source 1..3884: mol_type = genomic DNA
  misc_feature 1..3884: note = cDNA of KCNH2 gene SNP c.779C>T (p.Ala260Val)
atgccggtgcggaggggccacgtcgcgccgcagaacaccttcctggacaccatcatccgcaagtttgagggccagagccgtaagttcatcatcgccaacgctcgggtggagaactgcgccgtcatctactgcaacgacggcttctgcgagctgtgcggctactcgcgggccgaggtgatgcagcgaccctgcacctgcgacttcctgcacgggccgcgcacgcagcgccgcgctgccgcgcagatcgcgcaggcactgctgggcgccgaggagcgcaaagtggaaatcgccttctaccggaaagatgggagctgcttcctatgtctggtggatgtggtgcccgtgaagaacgaggatggggctgtcatcatgttcatcctcaatttcgaggtggtgatggagaaggacatggtggggtccccggctcatgacaccaaccaccggggcccccccaccagctggctggccccaggccgcgccaagaccttccgcctgaagctgcccgcgctgctggcgctgacggcccgggagtcgtcggtgcggtcgggcggcgcgggcggcgcgggcgccccgggggccgtggtggtggacgtggacctgacgcccgcggcacccagcagcgagtcgctggccctggacgaagtgacagccatggacaaccacgtggcagggctcgggcccgcggaggagcggcgtgcgctggtgggtcccggctctccgccccgcagcgcgcccggccagctcccatcgccccgggcgcacagcctcaaccccgacgtctcgggctccagctgcagcctggcccggacgcgctcccgagaaagctgcgccagcgtgcgccgcgcctcgtcggccgacgacatcgaggccatgcgcgccggggtgctgcccccgccaccgcgccacgccagcaccggggccatgcacccactgcgcagcggcttgctcaactccacctcggactccgacctcgtgcgctaccgcaccattagcaagattccccaaatcaccctcaactttgtggacctcaagggcgaccccttcttggcttcgcccaccagtgaccgtgagatcatagcacctaagataaaggagcgaacccacaatgtcactgagaaggtcacccaggtcctgtccctgggcgccgacgtgctgcctgagtacaagctgcaggcaccgcgcatccaccgctggaccatcctgcattacagccccttcaaggccgtgtgggactggctcatcctgctgctggtcatctacacggctgtcttcacaccctactcggctgccttcctgctgaaggagacggaagaaggcccgcctgctaccgagtgtggctacgcctgccagccgctggctgtggtggacctcatcgtggacatcatgttcattgtggacatcctcatcaacttccgcaccacctacgtcaatgccaacgaggaggtggtcagccaccccggccgcatcgccgtccactacttcaagggctggttcctcatcgacatggtggccgccatccccttcgacctgctcatcttcggctctggctctgaggagctgatcgggctgctgaagactgcgcggctgctgcggctggtgcgcgtggcgcggaagctggatcgctactcagagtacggcgcggccgtgctgttcttgctcatgtgcacctttgcgctcatcgcgcactggctagcctgcatctggtacgccatcggcaacatggagcagccacacatggactcacgcatcggctggctgcacaacctgggcgaccagataggcaaaccctacaacagcagcggcctgggcggcccctccatcaaggacaagtatgtgacggcgctctacttcaccttcagcagcctcaccagtgtgggcttcggcaacgtctctcccaacaccaactcagagaagatcttctccatctgcgtcatgctcattggctccctcatgtatgctagcatcttcggcaacgtgtcggccatcatccagcggctgtactcgggcacagcccgctaccacacacagatgctgcgggtgcgggagttcatccgcttccaccagatccccaatcccctgcgccagcgcctcgaggagtacttccagcacgcctggtcctacaccaacggcatcgacatgaacgcggtgctgaagggcttccctgagtgcctgcaggctgacatctgcctgcacctgaaccgctcactgctgcagcactgcaaacccttccgaggggccaccaagggctgccttcgggccctggccatgaagttcaagaccacacatgcaccgccaggggacacactggtgcatgctggggacctgctcaccgccctgtacttcatctcccggggctccatcgagatcctgcggggcgacgtcgtcgtggccatcctggggaagaatgacatctttggggagcctctgaacctgtatgcaaggcctggcaagtcgaacggggatgtgcgggccctcacctactgtgacctacacaagatccatcgggacgacctgctggaggtgctggacatgtaccctgagttctccgaccacttctggtccagcctggagatcaccttcaacctgcgagataccaacatgatcccgggctcccccggcagtacggagttagagggtggcttcagtcggcaacgcaagcgcaagttgtccttccgcaggcgcacggacaaggacacggagcagccaggggaggtgtcggccttggggccgggccgggcgggggcagggccgagtagccggggccggccgggggggccgtggggggagagcccgtccagtggcccctccagccctgagagcagtgaggatgagggcccaggccgcagctccagccccctccgcctggtgcccttctccagccccaggccccccggagagccgccgggtggggagcccctgatggaggactgcgagaagagcagcgacacttgcaaccccctgtcaggcgccttctcaggagtgtccaacattttcagcttctggggggacagtcggggccgccagtaccaggagctccctcgatgccccgcccccacccccagcctcctcaacatccccctctccagcccgggtcggcggccccggggcgacgtggagagcaggctggatgccctccagcgccagctcaacaggctggagacccggctgagtgcagacatggccactgtcctgcagctgctacagaggcagatgacgctggtcccgcccgcctacagtgctgtgaccaccccggggcctggccccacttccacatccccgctgttgcccgtcagccccctccccaccctcaccttggactcgctttctcaggtttcccagttcatggcgtgtgaggagctgcccccgggggccccagagcttccccaagaaggccccacacgacgcctctccctaccgggccagctgggggccctcacctcccagcccctgcacagacacggctcggacccgggcagttagtggggctgcccagtgtggacacgtggctcacccagggatcaaggcgctgctgggccgctccccttggaggccctgctcaggaggccctgaccgtggaaggggagaggaactcgaaagcacagctcctcccccagcccttgggaccatcttctcctgcagtcccctgggccccagtgagaggggcaggggcagggccggcagtaggtggggcctgtggtccccccactgccctgagggcattagctggtctaactgcccggaggcacccggccctgggccttaggcacctcaaggacttttctgctatttactgctcttattgttaaggataataattaaggatcatatgaataattaatgaagatgctgatgactatgaataataaataattatcctgaggaga

SEQ ID NO: 984 - DNA, 3884 bp, Homo sapiens
  source 1..3884: mol_type = genomic DNA
  misc_feature 1..3884: note = cDNA of KCNH2 gene SNP c.77G>T (p.Ser26Ile)
atgccggtgcggaggggccacgtcgcgccgcagaacaccttcctggacaccatcatccgcaagtttgagggccagatccgtaagttcatcatcgccaacgctcgggtggagaactgcgccgtcatctactgcaacgacggcttctgcgagctgtgcggctactcgcgggccgaggtgatgcagcgaccctgcacctgcgacttcctgcacgggccgcgcacgcagcgccgcgctgccgcgcagatcgcgcaggcactgctgggcgccgaggagcgcaaagtggaaatcgccttctaccggaaagatgggagctgcttcctatgtctggtggatgtggtgcccgtgaagaacgaggatggggctgtcatcatgttcatcctcaatttcgaggtggtgatggagaaggacatggtggggtccccggctcatgacaccaaccaccggggcccccccaccagctggctggccccaggccgcgccaagaccttccgcctgaagctgcccgcgctgctggcgctgacggcccgggagtcgtcggtgcggtcgggcggcgcgggcggcgcgggcgccccgggggccgtggtggtggacgtggacctgacgcccgcggcacccagcagcgagtcgctggccctggacgaagtgacagccatggacaaccacgtggcagggctcgggcccgcggaggagcggcgtgcgctggtgggtcccggctctccgccccgcagcgcgcccggccagctcccatcgccccgggcgcacagcctcaaccccgacgcctcgggctccagctgcagcctggcccggacgcgctcccgagaaagctgcgccagcgtgcgccgcgcctcgtcggccgacgacatcgaggccatgcgcgccggggtgctgcccccgccaccgcgccacgccagcaccggggccatgcacccactgcgcagcggcttgctcaactccacctcggactccgacctcgtgcgctaccgcaccattagcaagattccccaaatcaccctcaactttgtggacctcaagggcgaccccttcttggcttcgcccaccagtgaccgtgagatcatagcacctaagataaaggagcgaacccacaatgtcactgagaaggtcacccaggtcctgtccctgggcgccgacgtgctgcctgagtacaagctgcaggcaccgcgcatccaccgctggaccatcctgcattacagccccttcaaggccgtgtgggactggctcatcctgctgctggtcatctacacggctgtcttcacaccctactcggctgccttcctgctgaaggagacggaagaaggcccgcctgctaccgagtgtggctacgcctgccagccgctggctgtggtggacctcatcgtggacatcatgttcattgtggacatcctcatcaacttccgcaccacctacgtcaatgccaacgaggaggtggtcagccaccccggccgcatcgccgtccactacttcaagggctggttcctcatcgacatggtggccgccatccccttcgacctgctcatcttcggctctggctctgaggagctgatcgggctgctgaagactgcgcggctgctgcggctggtgcgcgtggcgcggaagctggatcgctactcagagtacggcgcggccgtgctgttcttgctcatgtgcacctttgcgctcatcgcgcactggctagcctgcatctggtacgccatcggcaacatggagcagccacacatggactcacgcatcggctggctgcacaacctgggcgaccagataggcaaaccctacaacagcagcggcctgggcggcccctccatcaaggacaagtatgtgacggcgctctacttcaccttcagcagcctcaccagtgtgggcttcggcaacgtctctcccaacaccaactcagagaagatcttctccatctgcgtcatgctcattggctccctcatgtatgctagcatcttcggcaacgtgtcggccatcatccagcggctgtactcgggcacagcccgctaccacacacagatgctgcgggtgcgggagttcatccgcttccaccagatccccaatcccctgcgccagcgcctcgaggagtacttccagcacgcctggtcctacaccaacggcatcgacatgaacgcggtgctgaagggcttccctgagtgcctgcaggctgacatctgcctgcacctgaaccgctcactgctgcagcactgcaaacccttccgaggggccaccaagggctgccttcgggccctggccatgaagttcaagaccacacatgcaccgccaggggacacactggtgcatgctggggacctgctcaccgccctgtacttcatctcccggggctccatcgagatcctgcggggcgacgtcgtcgtggccatcctggggaagaatgacatctttggggagcctctgaacctgtatgcaaggcctggcaagtcgaacggggatgtgcgggccctcacctactgtgacctacacaagatccatcgggacgacctgctggaggtgctggacatgtaccctgagttctccgaccacttctggtccagcctggagatcaccttcaacctgcgagataccaacatgatcccgggctcccccggcagtacggagttagagggtggcttcagtcggcaacgcaagcgcaagttgtccttccgcaggcgcacggacaaggacacggagcagccaggggaggtgtcggccttggggccgggccgggcgggggcagggccgagtagccggggccggccgggggggccgtggggggagagcccgtccagtggcccctccagccctgagagcagtgaggatgagggcccaggccgcagctccagccccctccgcctggtgcccttctccagccccaggccccccggagagccgccgggtggggagcccctgatggaggactgcgagaagagcagcgacacttgcaaccccctgtcaggcgccttctcaggagtgtccaacattttcagcttctggggggacagtcggggccgccagtaccaggagctccctcgatgccccgcccccacccccagcctcctcaacatccccctctccagcccgggtcggcggccccggggcgacgtggagagcaggctggatgccctccagcgccagctcaacaggctggagacccggctgagtgcagacatggccactgtcctgcagctgctacagaggcagatgacgctggtcccgcccgcctacagtgctgtgaccaccccggggcctggccccacttccacatccccgctgttgcccgtcagccccctccccaccctcaccttggactcgctttctcaggtttcccagttcatggcgtgtgaggagctgcccccgggggccccagagcttccccaagaaggccccacacgacgcctctccctaccgggccagctgggggccctcacctcccagcccctgcacagacacggctcggacccgggcagttagtggggctgcccagtgtggacacgtggctcacccagggatcaaggcgctgctgggccgctccccttggaggccctgctcaggaggccctgaccgtggaaggggagaggaactcgaaagcacagctcctcccccagcccttgggaccatcttctcctgcagtcccctgggccccagtgagaggggcaggggcagggccggcagtaggtggggcctgtggtccccccactgccctgagggcattagctggtctaactgcccggaggcacccggccctgggccttaggcacctcaaggacttttctgctatttactgctcttattgttaaggataataattaaggatcatatgaataattaatgaagatgctgatgactatgaataataaataattatcctgaggaga

SEQ ID NO: 985 - DNA, 3884 bp, Homo sapiens
  source 1..3884: mol_type = genomic DNA
  misc_feature 1..3884: note = cDNA of KCNH2 gene SNP c.797G>T (p.Ser266Ile)
atgccggtgcggaggggccacgtcgcgccgcagaacaccttcctggacaccatcatccgcaagtttgagggccagagccgtaagttcatcatcgccaacgctcgggtggagaactgcgccgtcatctactgcaacgacggcttctgcgagctgtgcggctactcgcgggccgaggtgatgcagcgaccctgcacctgcgacttcctgcacgggccgcgcacgcagcgccgcgctgccgcgcagatcgcgcaggcactgctgggcgccgaggagcgcaaagtggaaatcgccttctaccggaaagatgggagctgcttcctatgtctggtggatgtggtgcccgtgaagaacgaggatggggctgtcatcatgttcatcctcaatttcgaggtggtgatggagaaggacatggtggggtccccggctcatgacaccaaccaccggggcccccccaccagctggctggccccaggccgcgccaagaccttccgcctgaagctgcccgcgctgctggcgctgacggcccgggagtcgtcggtgcggtcgggcggcgcgggcggcgcgggcgccccgggggccgtggtggtggacgtggacctgacgcccgcggcacccagcagcgagtcgctggccctggacgaagtgacagccatggacaaccacgtggcagggctcgggcccgcggaggagcggcgtgcgctggtgggtcccggctctccgccccgcagcgcgcccggccagctcccatcgccccgggcgcacagcctcaaccccgacgcctcgggctccagctgcatcctggcccggacgcgctcccgagaaagctgcgccagcgtgcgccgcgcctcgtcggccgacgacatcgaggccatgcgcgccggggtgctgcccccgccaccgcgccacgccagcaccggggccatgcacccactgcgcagcggcttgctcaactccacctcggactccgacctcgtgcgctaccgcaccattagcaagattccccaaatcaccctcaactttgtggacctcaagggcgaccccttcttggcttcgcccaccagtgaccgtgagatcatagcacctaagataaaggagcgaacccacaatgtcactgagaaggtcacccaggtcctgtccctgggcgccgacgtgctgcctgagtacaagctgcaggcaccgcgcatccaccgctggaccatcctgcattacagccccttcaaggccgtgtgggactggctcatcctgctgctggtcatctacacggctgtcttcacaccctactcggctgccttcctgctgaaggagacggaagaaggcccgcctgctaccgagtgtggctacgcctgccagccgctggctgtggtggacctcatcgtggacatcatgttcattgtggacatcctcatcaacttccgcaccacctacgtcaatgccaacgaggaggtggtcagccaccccggccgcatcgccgtccactacttcaagggctggttcctcatcgacatggtggccgccatccccttcgacctgctcatcttcggctctggctctgaggagctgatcgggctgctgaagactgcgcggctgctgcggctggtgcgcgtggcgcggaagctggatcgctactcagagtacggcgcggccgtgctgttcttgctcatgtgcacctttgcgctcatcgcgcactggctagcctgcatctggtacgccatcggcaacatggagcagccacacatggactcacgcatcggctggctgcacaacctgggcgaccagataggcaaaccctacaacagcagcggcctgggcggcccctccatcaaggacaagtatgtgacggcgctctacttcaccttcagcagcctcaccagtgtgggcttcggcaacgtctctcccaacaccaactcagagaagatcttctccatctgcgtcatgctcattggctccctcatgtatgctagcatcttcggcaacgtgtcggccatcatccagcggctgtactcgggcacagcccgctaccacacacagatgctgcgggtgcgggagttcatccgcttccaccagatccccaatcccctgcgccagcgcctcgaggagtacttccagcacgcctggtcctacaccaacggcatcgacatgaacgcggtgctgaagggcttccctgagtgcctgcaggctgacatctgcctgcacctgaaccgctcactgctgcagcactgcaaacccttccgaggggccaccaagggctgccttcgggccctggccatgaagttcaagaccacacatgcaccgccaggggacacactggtgcatgctggggacctgctcaccgccctgtacttcatctcccggggctccatcgagatcctgcggggcgacgtcgtcgtggccatcctggggaagaatgacatctttggggagcctctgaacctgtatgcaaggcctggcaagtcgaacggggatgtgcgggccctcacctactgtgacctacacaagatccatcgggacgacctgctggaggtgctggacatgtaccctgagttctccgaccacttctggtccagcctggagatcaccttcaacctgcgagataccaacatgatcccgggctcccccggcagtacggagttagagggtggcttcagtcggcaacgcaagcgcaagttgtccttccgcaggcgcacggacaaggacacggagcagccaggggaggtgtcggccttggggccgggccgggcgggggcagggccgagtagccggggccggccgggggggccgtggggggagagcccgtccagtggcccctccagccctgagagcagtgaggatgagggcccaggccgcagctccagccccctccgcctggtgcccttctccagccccaggccccccggagagccgccgggtggggagcccctgatggaggactgcgagaagagcagcgacacttgcaaccccctgtcaggcgccttctcaggagtgtccaacattttcagcttctggggggacagtcggggccgccagtaccaggagctccctcgatgccccgcccccacccccagcctcctcaacatccccctctccagcccgggtcggcggccccggggcgacgtggagagcaggctggatgccctccagcgccagctcaacaggctggagacccggctgagtgcagacatggccactgtcctgcagctgctacagaggcagatgacgctggtcccgcccgcctacagtgctgtgaccaccccggggcctggccccacttccacatccccgctgttgcccgtcagccccctccccaccctcaccttggactcgctttctcaggtttcccagttcatggcgtgtgaggagctgcccccgggggccccagagcttccccaagaaggccccacacgacgcctctccctaccgggccagctgggggccctcacctcccagcccctgcacagacacggctcggacccgggcagttagtggggctgcccagtgtggacacgtggctcacccagggatcaaggcgctgctgggccgctccccttggaggccctgctcaggaggccctgaccgtggaaggggagaggaactcgaaagcacagctcctcccccagcccttgggaccatcttctcctgcagtcccctgggccccagtgagaggggcaggggcagggccggcagtaggtggggcctgtggtccccccactgccctgagggcattagctggtctaactgcccggaggcacccggccctgggccttaggcacctcaaggacttttctgctatttactgctcttattgttaaggataataattaaggatcatatgaataattaatgaagatgctgatgactatgaataataaataattatcctgaggaga

SEQ ID NO: 986 - DNA, 3884 bp, Homo sapiens
  source 1..3884: mol_type = genomic DNA
  misc_feature 1..3884: note = cDNA of KCNH2 gene SNP c.803C>A (p.Ala268Asp)
atgccggtgcggaggggccacgtcgcgccgcagaacaccttcctggacaccatcatccgcaagtttgagggccagagccgtaagttcatcatcgccaacgctcgggtggagaactgcgccgtcatctactgcaacgacggcttctgcgagctgtgcggctactcgcgggccgaggtgatgcagcgaccctgcacctgcgacttcctgcacgggccgcgcacgcagcgccgcgctgccgcgcagatcgcgcaggcactgctgggcgccgaggagcgcaaagtggaaatcgccttctaccggaaagatgggagctgcttcctatgtctggtggatgtggtgcccgtgaagaacgaggatggggctgtcatcatgttcatcctcaatttcgaggtggtgatggagaaggacatggtggggtccccggctcatgacaccaaccaccggggcccccccaccagctggctggccccaggccgcgccaagaccttccgcctgaagctgcccgcgctgctggcgctgacggcccgggagtcgtcggtgcggtcgggcggcgcgggcggcgcgggcgccccgggggccgtggtggtggacgtggacctgacgcccgcggcacccagcagcgagtcgctggccctggacgaagtgacagccatggacaaccacgtggcagggctcgggcccgcggaggagcggcgtgcgctggtgggtcccggctctccgccccgcagcgcgcccggccagctcccatcgccccgggcgcacagcctcaaccccgacgcctcgggctccagctgcagcctggaccggacgcgctcccgagaaagctgcgccagcgtgcgccgcgcctcgtcggccgacgacatcgaggccatgcgcgccggggtgctgcccccgccaccgcgccacgccagcaccggggccatgcacccactgcgcagcggcttgctcaactccacctcggactccgacctcgtgcgctaccgcaccattagcaagattccccaaatcaccctcaactttgtggacctcaagggcgaccccttcttggcttcgcccaccagtgaccgtgagatcatagcacctaagataaaggagcgaacccacaatgtcactgagaaggtcacccaggtcctgtccctgggcgccgacgtgctgcctgagtacaagctgcaggcaccgcgcatccaccgctggaccatcctgcattacagccccttcaaggccgtgtgggactggctcatcctgctgctggtcatctacacggctgtcttcacaccctactcggctgccttcctgctgaaggagacggaagaaggcccgcctgctaccgagtgtggctacgcctgccagccgctggctgtggtggacctcatcgtggacatcatgttcattgtggacatcctcatcaacttccgcaccacctacgtcaatgccaacgaggaggtggtcagccaccccggccgcatcgccgtccactacttcaagggctggttcctcatcgacatggtggccgccatccccttcgacctgctcatcttcggctctggctctgaggagctgatcgggctgctgaagactgcgcggctgctgcggctggtgcgcgtggcgcggaagctggatcgctactcagagtacggcgcggccgtgctgttcttgctcatgtgcacctttgcgctcatcgcgcactggctagcctgcatctggtacgccatcggcaacatggagcagccacacatggactcacgcatcggctggctgcacaacctgggcgaccagataggcaaaccctacaacagcagcggcctgggcggcccctccatcaaggacaagtatgtgacggcgctctacttcaccttcagcagcctcaccagtgtgggcttcggcaacgtctctcccaacaccaactcagagaagatcttctccatctgcgtcatgctcattggctccctcatgtatgctagcatcttcggcaacgtgtcggccatcatccagcggctgtactcgggcacagcccgctaccacacacagatgctgcgggtgcgggagttcatccgcttccaccagatccccaatcccctgcgccagcgcctcgaggagtacttccagcacgcctggtcctacaccaacggcatcgacatgaacgcggtgctgaagggcttccctgagtgcctgcaggctgacatctgcctgcacctgaaccgctcactgctgcagcactgcaaacccttccgaggggccaccaagggctgccttcgggccctggccatgaagttcaagaccacacatgcaccgccaggggacacactggtgcatgctggggacctgctcaccgccctgtacttcatctcccggggctccatcgagatcctgcggggcgacgtcgtcgtggccatcctggggaagaatgacatctttggggagcctctgaacctgtatgcaaggcctggcaagtcgaacggggatgtgcgggccctcacctactgtgacctacacaagatccatcgggacgacctgctggaggtgctggacatgtaccctgagttctccgaccacttctggtccagcctggagatcaccttcaacctgcgagataccaacatgatcccgggctcccccggcagtacggagttagagggtggcttcagtcggcaacgcaagcgcaagttgtccttccgcaggcgcacggacaaggacacggagcagccaggggaggtgtcggccttggggccgggccgggcgggggcagggccgagtagccggggccggccgggggggccgtggggggagagcccgtccagtggcccctccagccctgagagcagtgaggatgagggcccaggccgcagctccagccccctccgcctggtgcccttctccagccccaggccccccggagagccgccgggtggggagcccctgatggaggactgcgagaagagcagcgacacttgcaaccccctgtcaggcgccttctcaggagtgtccaacattttcagcttctggggggacagtcggggccgccagtaccaggagctccctcgatgccccgcccccacccccagcctcctcaacatccccctctccagcccgggtcggcggccccggggcgacgtggagagcaggctggatgccctccagcgccagctcaacaggctggagacccggctgagtgcagacatggccactgtcctgcagctgctacagaggcagatgacgctggtcccgcccgcctacagtgctgtgaccaccccggggcctggccccacttccacatccccgctgttgcccgtcagccccctccccaccctcaccttggactcgctttctcaggtttcccagttcatggcgtgtgaggagctgcccccgggggccccagagcttccccaagaaggccccacacgacgcctctccctaccgggccagctgggggccctcacctcccagcccctgcacagacacggctcggacccgggcagttagtggggctgcccagtgtggacacgtggctcacccagggatcaaggcgctgctgggccgctccccttggaggccctgctcaggaggccctgaccgtggaaggggagaggaactcgaaagcacagctcctcccccagcccttgggaccatcttctcctgcagtcccctgggccccagtgagaggggcaggggcagggccggcagtaggtggggcctgtggtccccccactgccctgagggcattagctggtctaactgcccggaggcacccggccctgggccttaggcacctcaaggacttttctgctatttactgctcttattgttaaggataataattaaggatcatatgaataattaatgaagatgctgatgactatgaataataaataattatcctgaggaga

SEQ ID NO: 987 - DNA, 3884 bp, Homo sapiens
  source 1..3884: mol_type = genomic DNA
  misc_feature 1..3884: note = cDNA of KCNH2 gene SNP c.805C>T (p.Arg269Trp)
atgccggtgcggaggggccacgtcgcgccgcagaacaccttcctggacaccatcatccgcaagtttgagggccagagccgtaagttcatcatcgccaacgctcgggtggagaactgcgccgtcatctactgcaacgacggcttctgcgagctgtgcggctactcgcgggccgaggtgatgcagcgaccctgcacctgcgacttcctgcacgggccgcgcacgcagcgccgcgctgccgcgcagatcgcgcaggcactgctgggcgccgaggagcgcaaagtggaaatcgccttctaccggaaagatgggagctgcttcctatgtctggtggatgtggtgcccgtgaagaacgaggatggggctgtcatcatgttcatcctcaatttcgaggtggtgatggagaaggacatggtggggtccccggctcatgacaccaaccaccggggcccccccaccagctggctggccccaggccgcgccaagaccttccgcctgaagctgcccgcgctgctggcgctgacggcccgggagtcgtcggtgcggtcgggcggcgcgggcggcgcgggcgccccgggggccgtggtggtggacgtggacctgacgcccgcggcacccagcagcgagtcgctggccctggacgaagtgacagccatggacaaccacgtggcagggctcgggcccgcggaggagcggcgtgcgctggtgggtcccggctctccgccccgcagcgcgcccggccagctcccatcgccccgggcgcacagcctcaaccccgacgcctcgggctccagctgcagcctggcctggacgcgctcccgagaaagctgcgccagcgtgcgccgcgcctcgtcggccgacgacatcgaggccatgcgcgccggggtgctgcccccgccaccgcgccacgccagcaccggggccatgcacccactgcgcagcggcttgctcaactccacctcggactccgacctcgtgcgctaccgcaccattagcaagattccccaaatcaccctcaactttgtggacctcaagggcgaccccttcttggcttcgcccaccagtgaccgtgagatcatagcacctaagataaaggagcgaacccacaatgtcactgagaaggtcacccaggtcctgtccctgggcgccgacgtgctgcctgagtacaagctgcaggcaccgcgcatccaccgctggaccatcctgcattacagccccttcaaggccgtgtgggactggctcatcctgctgctggtcatctacacggctgtcttcacaccctactcggctgccttcctgctgaaggagacggaagaaggcccgcctgctaccgagtgtggctacgcctgccagccgctggctgtggtggacctcatcgtggacatcatgttcattgtggacatcctcatcaacttccgcaccacctacgtcaatgccaacgaggaggtggtcagccaccccggccgcatcgccgtccactacttcaagggctggttcctcatcgacatggtggccgccatccccttcgacctgctcatcttcggctctggctctgaggagctgatcgggctgctgaagactgcgcggctgctgcggctggtgcgcgtggcgcggaagctggatcgctactcagagtacggcgcggccgtgctgttcttgctcatgtgcacctttgcgctcatcgcgcactggctagcctgcatctggtacgccatcggcaacatggagcagccacacatggactcacgcatcggctggctgcacaacctgggcgaccagataggcaaaccctacaacagcagcggcctgggcggcccctccatcaaggacaagtatgtgacggcgctctacttcaccttcagcagcctcaccagtgtgggcttcggcaacgtctctcccaacaccaactcagagaagatcttctccatctgcgtcatgctcattggctccctcatgtatgctagcatcttcggcaacgtgtcggccatcatccagcggctgtactcgggcacagcccgctaccacacacagatgctgcgggtgcgggagttcatccgcttccaccagatccccaatcccctgcgccagcgcctcgaggagtacttccagcacgcctggtcctacaccaacggcatcgacatgaacgcggtgctgaagggcttccctgagtgcctgcaggctgacatctgcctgcacctgaaccgctcactgctgcagcactgcaaacccttccgaggggccaccaagggctgccttcgggccctggccatgaagttcaagaccacacatgcaccgccaggggacacactggtgcatgctggggacctgctcaccgccctgtacttcatctcccggggctccatcgagatcctgcggggcgacgtcgtcgtggccatcctggggaagaatgacatctttggggagcctctgaacctgtatgcaaggcctggcaagtcgaacggggatgtgcgggccctcacctactgtgacctacacaagatccatcgggacgacctgctggaggtgctggacatgtaccctgagttctccgaccacttctggtccagcctggagatcaccttcaacctgcgagataccaacatgatcccgggctcccccggcagtacggagttagagggtggcttcagtcggcaacgcaagcgcaagttgtccttccgcaggcgcacggacaaggacacggagcagccaggggaggtgtcggccttggggccgggccgggcgggggcagggccgagtagccggggccggccgggggggccgtggggggagagcccgtccagtggcccctccagccctgagagcagtgaggatgagggcccaggccgcagctccagccccctccgcctggtgcccttctccagccccaggccccccggagagccgccgggtggggagcccctgatggaggactgcgagaagagcagcgacacttgcaaccccctgtcaggcgccttctcaggagtgtccaacattttcagcttctggggggacagtcggggccgccagtaccaggagctccctcgatgccccgcccccacccccagcctcctcaacatccccctctccagcccgggtcggcggccccggggcgacgtggagagcaggctggatgccctccagcgccagctcaacaggctggagacccggctgagtgcagacatggccactgtcctgcagctgctacagaggcagatgacgctggtcccgcccgcctacagtgctgtgaccaccccggggcctggccccacttccacatccccgctgttgcccgtcagccccctccccaccctcaccttggactcgctttctcaggtttcccagttcatggcgtgtgaggagctgcccccgggggccccagagcttccccaagaaggccccacacgacgcctctccctaccgggccagctgggggccctcacctcccagcccctgcacagacacggctcggacccgggcagttagtggggctgcccagtgtggacacgtggctcacccagggatcaaggcgctgctgggccgctccccttggaggccctgctcaggaggccctgaccgtggaaggggagaggaactcgaaagcacagctcctcccccagcccttgggaccatcttctcctgcagtcccctgggccccagtgagaggggcaggggcagggccggcagtaggtggggcctgtggtccccccactgccctgagggcattagctggtctaactgcccggaggcacccggccctgggccttaggcacctcaaggacttttctgctatttactgctcttattgttaaggataataattaaggatcatatgaataattaatgaagatgctgatgactatgaataataaataattatcctgaggaga

SEQ ID NO: 988 - DNA, 3884 bp, Homo sapiens
  source 1..3884: mol_type = genomic DNA
  misc_feature 1..3884: note = cDNA of KCNH2 gene SNP c.80G>A (p.Arg27His)
atgccggtgcggaggggccacgtcgcgccgcagaacaccttcctggacaccatcatccgcaagtttgagggccagagccataagttcatcatcgccaacgctcgggtggagaactgcgccgtcatctactgcaacgacggcttctgcgagctgtgcggctactcgcgggccgaggtgatgcagcgaccctgcacctgcgacttcctgcacgggccgcgcacgcagcgccgcgctgccgcgcagatcgcgcaggcactgctgggcgccgaggagcgcaaagtggaaatcgccttctaccggaaagatgggagctgcttcctatgtctggtggatgtggtgcccgtgaagaacgaggatggggctgtcatcatgttcatcctcaatttcgaggtggtgatggagaaggacatggtggggtccccggctcatgacaccaaccaccggggcccccccaccagctggctggccccaggccgcgccaagaccttccgcctgaagctgcccgcgctgctggcgctgacggcccgggagtcgtcggtgcggtcgggcggcgcgggcggcgcgggcgccccgggggccgtggtggtggacgtggacctgacgcccgcggcacccagcagcgagtcgctggccctggacgaagtgacagccatggacaaccacgtggcagggctcgggcccgcggaggagcggcgtgcgctggtgggtcccggctctccgccccgcagcgcgcccggccagctcccatcgccccgggcgcacagcctcaaccccgacgcctcgggctccagctgcagcctggcccggacgcgctcccgagaaagctgcgccagcgtgcgccgcgcctcgtcggccgacgacatcgaggccatgcgcgccggggtgctgcccccgccaccgcgccacgccagcaccggggccatgcacccactgcgcagcggcttgctcaactccacctcggactccgacctcgtgcgctaccgcaccattagcaagattccccaaatcaccctcaactttgtggacctcaagggcgaccccttcttggcttcgcccaccagtgaccgtgagatcatagcacctaagataaaggagcgaacccacaatgtcactgagaaggtcacccaggtcctgtccctgggcgccgacgtgctgcctgagtacaagctgcaggcaccgcgcatccaccgctggaccatcctgcattacagccccttcaaggccgtgtgggactggctcatcctgctgctggtcatctacacggctgtcttcacaccctactcggctgccttcctgctgaaggagacggaagaaggcccgcctgctaccgagtgtggctacgcctgccagccgctggctgtggtggacctcatcgtggacatcatgttcattgtggacatcctcatcaacttccgcaccacctacgtcaatgccaacgaggaggtggtcagccaccccggccgcatcgccgtccactacttcaagggctggttcctcatcgacatggtggccgccatccccttcgacctgctcatcttcggctctggctctgaggagctgatcgggctgctgaagactgcgcggctgctgcggctggtgcgcgtggcgcggaagctggatcgctactcagagtacggcgcggccgtgctgttcttgctcatgtgcacctttgcgctcatcgcgcactggctagcctgcatctggtacgccatcggcaacatggagcagccacacatggactcacgcatcggctggctgcacaacctgggcgaccagataggcaaaccctacaacagcagcggcctgggcggcccctccatcaaggacaagtatgtgacggcgctctacttcaccttcagcagcctcaccagtgtgggcttcggcaacgtctctcccaacaccaactcagagaagatcttctccatctgcgtcatgctcattggctccctcatgtatgctagcatcttcggcaacgtgtcggccatcatccagcggctgtactcgggcacagcccgctaccacacacagatgctgcgggtgcgggagttcatccgcttccaccagatccccaatcccctgcgccagcgcctcgaggagtacttccagcacgcctggtcctacaccaacggcatcgacatgaacgcggtgctgaagggcttccctgagtgcctgcaggctgacatctgcctgcacctgaaccgctcactgctgcagcactgcaaacccttccgaggggccaccaagggctgccttcgggccctggccatgaagttcaagaccacacatgcaccgccaggggacacactggtgcatgctggggacctgctcaccgccctgtacttcatctcccggggctccatcgagatcctgcggggcgacgtcgtcgtggccatcctggggaagaatgacatctttggggagcctctgaacctgtatgcaaggcctggcaagtcgaacggggatgtgcgggccctcacctactgtgacctacacaagatccatcgggacgacctgctggaggtgctggacatgtaccctgagttctccgaccacttctggtccagcctggagatcaccttcaacctgcgagataccaacatgatcccgggctcccccggcagtacggagttagagggtggcttcagtcggcaacgcaagcgcaagttgtccttccgcaggcgcacggacaaggacacggagcagccaggggaggtgtcggccttggggccgggccgggcgggggcagggccgagtagccggggccggccgggggggccgtggggggagagcccgtccagtggcccctccagccctgagagcagtgaggatgagggcccaggccgcagctccagccccctccgcctggtgcccttctccagccccaggccccccggagagccgccgggtggggagcccctgatggaggactgcgagaagagcagcgacacttgcaaccccctgtcaggcgccttctcaggagtgtccaacattttcagcttctggggggacagtcggggccgccagtaccaggagctccctcgatgccccgcccccacccccagcctcctcaacatccccctctccagcccgggtcggcggccccggggcgacgtggagagcaggctggatgccctccagcgccagctcaacaggctggagacccggctgagtgcagacatggccactgtcctgcagctgctacagaggcagatgacgctggtcccgcccgcctacagtgctgtgaccaccccggggcctggccccacttccacatccccgctgttgcccgtcagccccctccccaccctcaccttggactcgctttctcaggtttcccagttcatggcgtgtgaggagctgcccccgggggccccagagcttccccaagaaggccccacacgacgcctctccctaccgggccagctgggggccctcacctcccagcccctgcacagacacggctcggacccgggcagttagtggggctgcccagtgtggacacgtggctcacccagggatcaaggcgctgctgggccgctccccttggaggccctgctcaggaggccctgaccgtggaaggggagaggaactcgaaagcacagctcctcccccagcccttgggaccatcttctcctgcagtcccctgggccccagtgagaggggcaggggcagggccggcagtaggtggggcctgtggtccccccactgccctgagggcattagctggtctaactgcccggaggcacccggccctgggccttaggcacctcaaggacttttctgctatttactgctcttattgttaaggataataattaaggatcatatgaataattaatgaagatgctgatgactatgaataataaataattatcctgaggaga

SEQ ID NO: 989 - DNA, 3884 bp, Homo sapiens
  source 1..3884: mol_type = genomic DNA
  misc_feature 1..3884: note = cDNA of KCNH2 gene SNP c.80G>C (p.Arg27Pro)
atgccggtgcggaggggccacgtcgcgccgcagaacaccttcctggacaccatcatccgcaagtttgagggccagagccctaagttcatcatcgccaacgctcgggtggagaactgcgccgtcatctactgcaacgacggcttctgcgagctgtgcggctactcgcgggccgaggtgatgcagcgaccctgcacctgcgacttcctgcacgggccgcgcacgcagcgccgcgctgccgcgcagatcgcgcaggcactgctgggcgccgaggagcgcaaagtggaaatcgccttctaccggaaagatgggagctgcttcctatgtctggtggatgtggtgcccgtgaagaacgaggatggggctgtcatcatgttcatcctcaatttcgaggtggtgatggagaaggacatggtggggtccccggctcatgacaccaaccaccggggcccccccaccagctggctggccccaggccgcgccaagaccttccgcctgaagctgcccgcgctgctggcgctgacggcccgggagtcgtcggtgcggtcgggcggcgcgggcggcgcgggcgccccgggggccgtggtggtggacgtggacctgacgcccgcggcacccagcagcgagtcgctggccctggacgaagtgacagccatggacaaccacgtggcagggctcgggcccgcggaggagcggcgtgcgctggtgggtcccggctctccgccccgcagcgcgcccggccagctcccatcgccccgggcgcacagcctcaaccccgacgcctcgggctccagctgcagcctggcccggacgcgctcccgagaaagctgcgccagcgtgcgccgcgcctcgtcggccgacgacatcgaggccatgcgcgccggggtgctgcccccgccaccgcgccacgccagcaccggggccatgcacccactgcgcagcggcttgctcaactccacctcggactccgacctcgtgcgctaccgcaccattagcaagattccccaaatcaccctcaactttgtggacctcaagggcgaccccttcttggcttcgcccaccagtgaccgtgagatcatagcacctaagataaaggagcgaacccacaatgtcactgagaaggtcacccaggtcctgtccctgggcgccgacgtgctgcctgagtacaagctgcaggcaccgcgcatccaccgctggaccatcctgcattacagccccttcaaggccgtgtgggactggctcatcctgctgctggtcatctacacggctgtcttcacaccctactcggctgccttcctgctgaaggagacggaagaaggcccgcctgctaccgagtgtggctacgcctgccagccgctggctgtggtggacctcatcgtggacatcatgttcattgtggacatcctcatcaacttccgcaccacctacgtcaatgccaacgaggaggtggtcagccaccccggccgcatcgccgtccactacttcaagggctggttcctcatcgacatggtggccgccatccccttcgacctgctcatcttcggctctggctctgaggagctgatcgggctgctgaagactgcgcggctgctgcggctggtgcgcgtggcgcggaagctggatcgctactcagagtacggcgcggccgtgctgttcttgctcatgtgcacctttgcgctcatcgcgcactggctagcctgcatctggtacgccatcggcaacatggagcagccacacatggactcacgcatcggctggctgcacaacctgggcgaccagataggcaaaccctacaacagcagcggcctgggcggcccctccatcaaggacaagtatgtgacggcgctctacttcaccttcagcagcctcaccagtgtgggcttcggcaacgtctctcccaacaccaactcagagaagatcttctccatctgcgtcatgctcattggctccctcatgtatgctagcatcttcggcaacgtgtcggccatcatccagcggctgtactcgggcacagcccgctaccacacacagatgctgcgggtgcgggagttcatccgcttccaccagatccccaatcccctgcgccagcgcctcgaggagtacttccagcacgcctggtcctacaccaacggcatcgacatgaacgcggtgctgaagggcttccctgagtgcctgcaggctgacatctgcctgcacctgaaccgctcactgctgcagcactgcaaacccttccgaggggccaccaagggctgccttcgggccctggccatgaagttcaagaccacacatgcaccgccaggggacacactggtgcatgctggggacctgctcaccgccctgtacttcatctcccggggctccatcgagatcctgcggggcgacgtcgtcgtggccatcctggggaagaatgacatctttggggagcctctgaacctgtatgcaaggcctggcaagtcgaacggggatgtgcgggccctcacctactgtgacctacacaagatccatcgggacgacctgctggaggtgctggacatgtaccctgagttctccgaccacttctggtccagcctggagatcaccttcaacctgcgagataccaacatgatcccgggctcccccggcagtacggagttagagggtggcttcagtcggcaacgcaagcgcaagttgtccttccgcaggcgcacggacaaggacacggagcagccaggggaggtgtcggccttggggccgggccgggcgggggcagggccgagtagccggggccggccgggggggccgtggggggagagcccgtccagtggcccctccagccctgagagcagtgaggatgagggcccaggccgcagctccagccccctccgcctggtgcccttctccagccccaggccccccggagagccgccgggtggggagcccctgatggaggactgcgagaagagcagcgacacttgcaaccccctgtcaggcgccttctcaggagtgtccaacattttcagcttctggggggacagtcggggccgccagtaccaggagctccctcgatgccccgcccccacccccagcctcctcaacatccccctctccagcccgggtcggcggccccggggcgacgtggagagcaggctggatgccctccagcgccagctcaacaggctggagacccggctgagtgcagacatggccactgtcctgcagctgctacagaggcagatgacgctggtcccgcccgcctacagtgctgtgaccaccccggggcctggccccacttccacatccccgctgttgcccgtcagccccctccccaccctcaccttggactcgctttctcaggtttcccagttcatggcgtgtgaggagctgcccccgggggccccagagcttccccaagaaggccccacacgacgcctctccctaccgggccagctgggggccctcacctcccagcccctgcacagacacggctcggacccgggcagttagtggggctgcccagtgtggacacgtggctcacccagggatcaaggcgctgctgggccgctccccttggaggccctgctcaggaggccctgaccgtggaaggggagaggaactcgaaagcacagctcctcccccagcccttgggaccatcttctcctgcagtcccctgggccccagtgagaggggcaggggcagggccggcagtaggtggggcctgtggtccccccactgccctgagggcattagctggtctaactgcccggaggcacccggccctgggccttaggcacctcaaggacttttctgctatttactgctcttattgttaaggataataattaaggatcatatgaataattaatgaagatgctgatgactatgaataataaataattatcctgaggaga

SEQ ID NO: 990 - DNA, 3884 bp, Homo sapiens
  source 1..3884: mol_type = genomic DNA
  misc_feature 1..3884: note = cDNA of KCNH2 gene SNP c.812G>A (p.Arg271His)
atgccggtgcggaggggccacgtcgcgccgcagaacaccttcctggacaccatcatccgcaagtttgagggccagagccgtaagttcatcatcgccaacgctcgggtggagaactgcgccgtcatctactgcaacgacggcttctgcgagctgtgcggctactcgcgggccgaggtgatgcagcgaccctgcacctgcgacttcctgcacgggccgcgcacgcagcgccgcgctgccgcgcagatcgcgcaggcactgctgggcgccgaggagcgcaaagtggaaatcgccttctaccggaaagatgggagctgcttcctatgtctggtggatgtggtgcccgtgaagaacgaggatggggctgtcatcatgttcatcctcaatttcgaggtggtgatggagaaggacatggtggggtccccggctcatgacaccaaccaccggggcccccccaccagctggctggccccaggccgcgccaagaccttccgcctgaagctgcccgcgctgctggcgctgacggcccgggagtcgtcggtgcggtcgggcggcgcgggcggcgcgggcgccccgggggccgtggtggtggacgtggacctgacgcccgcggcacccagcagcgagtcgctggccctggacgaagtgacagccatggacaaccacgtggcagggctcgggcccgcggaggagcggcgtgcgctggtgggtcccggctctccgccccgcagcgcgcccggccagctcccatcgccccgggcgcacagcctcaaccccgacgcctcgggctccagctgcagcctggcccggacgcactcccgagaaagctgcgccagcgtgcgccgcgcctcgtcggccgacgacatcgaggccatgcgcgccggggtgctgcccccgccaccgcgccacgccagcaccggggccatgcacccactgcgcagcggcttgctcaactccacctcggactccgacctcgtgcgctaccgcaccattagcaagattccccaaatcaccctcaactttgtggacctcaagggcgaccccttcttggcttcgcccaccagtgaccgtgagatcatagcacctaagataaaggagcgaacccacaatgtcactgagaaggtcacccaggtcctgtccctgggcgccgacgtgctgcctgagtacaagctgcaggcaccgcgcatccaccgctggaccatcctgcattacagccccttcaaggccgtgtgggactggctcatcctgctgctggtcatctacacggctgtcttcacaccctactcggctgccttcctgctgaaggagacggaagaaggcccgcctgctaccgagtgtggctacgcctgccagccgctggctgtggtggacctcatcgtggacatcatgttcattgtggacatcctcatcaacttccgcaccacctacgtcaatgccaacgaggaggtggtcagccaccccggccgcatcgccgtccactacttcaagggctggttcctcatcgacatggtggccgccatccccttcgacctgctcatcttcggctctggctctgaggagctgatcgggctgctgaagactgcgcggctgctgcggctggtgcgcgtggcgcggaagctggatcgctactcagagtacggcgcggccgtgctgttcttgctcatgtgcacctttgcgctcatcgcgcactggctagcctgcatctggtacgccatcggcaacatggagcagccacacatggactcacgcatcggctggctgcacaacctgggcgaccagataggcaaaccctacaacagcagcggcctgggcggcccctccatcaaggacaagtatgtgacggcgctctacttcaccttcagcagcctcaccagtgtgggcttcggcaacgtctctcccaacaccaactcagagaagatcttctccatctgcgtcatgctcattggctccctcatgtatgctagcatcttcggcaacgtgtcggccatcatccagcggctgtactcgggcacagcccgctaccacacacagatgctgcgggtgcgggagttcatccgcttccaccagatccccaatcccctgcgccagcgcctcgaggagtacttccagcacgcctggtcctacaccaacggcatcgacatgaacgcggtgctgaagggcttccctgagtgcctgcaggctgacatctgcctgcacctgaaccgctcactgctgcagcactgcaaacccttccgaggggccaccaagggctgccttcgggccctggccatgaagttcaagaccacacatgcaccgccaggggacacactggtgcatgctggggacctgctcaccgccctgtacttcatctcccggggctccatcgagatcctgcggggcgacgtcgtcgtggccatcctggggaagaatgacatctttggggagcctctgaacctgtatgcaaggcctggcaagtcgaacggggatgtgcgggccctcacctactgtgacctacacaagatccatcgggacgacctgctggaggtgctggacatgtaccctgagttctccgaccacttctggtccagcctggagatcaccttcaacctgcgagataccaacatgatcccgggctcccccggcagtacggagttagagggtggcttcagtcggcaacgcaagcgcaagttgtccttccgcaggcgcacggacaaggacacggagcagccaggggaggtgtcggccttggggccgggccgggcgggggcagggccgagtagccggggccggccgggggggccgtggggggagagcccgtccagtggcccctccagccctgagagcagtgaggatgagggcccaggccgcagctccagccccctccgcctggtgcccttctccagccccaggccccccggagagccgccgggtggggagcccctgatggaggactgcgagaagagcagcgacacttgcaaccccctgtcaggcgccttctcaggagtgtccaacattttcagcttctggggggacagtcggggccgccagtaccaggagctccctcgatgccccgcccccacccccagcctcctcaacatccccctctccagcccgggtcggcggccccggggcgacgtggagagcaggctggatgccctccagcgccagctcaacaggctggagacccggctgagtgcagacatggccactgtcctgcagctgctacagaggcagatgacgctggtcccgcccgcctacagtgctgtgaccaccccggggcctggccccacttccacatccccgctgttgcccgtcagccccctccccaccctcaccttggactcgctttctcaggtttcccagttcatggcgtgtgaggagctgcccccgggggccccagagcttccccaagaaggccccacacgacgcctctccctaccgggccagctgggggccctcacctcccagcccctgcacagacacggctcggacccgggcagttagtggggctgcccagtgtggacacgtggctcacccagggatcaaggcgctgctgggccgctccccttggaggccctgctcaggaggccctgaccgtggaaggggagaggaactcgaaagcacagctcctcccccagcccttgggaccatcttctcctgcagtcccctgggccccagtgagaggggcaggggcagggccggcagtaggtggggcctgtggtccccccactgccctgagggcattagctggtctaactgcccggaggcacccggccctgggccttaggcacctcaaggacttttctgctatttactgctcttattgttaaggataataattaaggatcatatgaataattaatgaagatgctgatgactatgaataataaataattatcctgaggaga

SEQ ID NO: 991 - DNA, 3884 bp, Homo sapiens
  source 1..3884: mol_type = genomic DNA
  misc_feature 1..3884: note = cDNA of KCNH2 gene SNP c.817C>G (p.Arg273Gly)
atgccggtgcggaggggccacgtcgcgccgcagaacaccttcctggacaccatcatccgcaagtttgagggccagagccgtaagttcatcatcgccaacgctcgggtggagaactgcgccgtcatctactgcaacgacggcttctgcgagctgtgcggctactcgcgggccgaggtgatgcagcgaccctgcacctgcgacttcctgcacgggccgcgcacgcagcgccgcgctgccgcgcagatcgcgcaggcactgctgggcgccgaggagcgcaaagtggaaatcgccttctaccggaaagatgggagctgcttcctatgtctggtggatgtggtgcccgtgaagaacgaggatggggctgtcatcatgttcatcctcaatttcgaggtggtgatggagaaggacatggtggggtccccggctcatgacaccaaccaccggggcccccccaccagctggctggccccaggccgcgccaagaccttccgcctgaagctgcccgcgctgctggcgctgacggcccgggagtcgtcggtgcggtcgggcggcgcgggcggcgcgggcgccccgggggccgtggtggtggacgtggacctgacgcccgcggcacccagcagcgagtcgctggccctggacgaagtgacagccatggacaaccacgtggcagggctcgggcccgcggaggagcggcgtgcgctggtgggtcccggctctccgccccgcagcgcgcccggccagctcccatcgccccgggcgcacagcctcaaccccgacgcctcgggctccagctgcagcctggcccggacgcgctccggagaaagctgcgccagcgtgcgccgcgcctcgtcggccgacgacatcgaggccatgcgcgccggggtgctgcccccgccaccgcgccacgccagcaccggggccatgcacccactgcgcagcggcttgctcaactccacctcggactccgacctcgtgcgctaccgcaccattagcaagattccccaaatcaccctcaactttgtggacctcaagggcgaccccttcttggcttcgcccaccagtgaccgtgagatcatagcacctaagataaaggagcgaacccacaatgtcactgagaaggtcacccaggtcctgtccctgggcgccgacgtgctgcctgagtacaagctgcaggcaccgcgcatccaccgctggaccatcctgcattacagccccttcaaggccgtgtgggactggctcatcctgctgctggtcatctacacggctgtcttcacaccctactcggctgccttcctgctgaaggagacggaagaaggcccgcctgctaccgagtgtggctacgcctgccagccgctggctgtggtggacctcatcgtggacatcatgttcattgtggacatcctcatcaacttccgcaccacctacgtcaatgccaacgaggaggtggtcagccaccccggccgcatcgccgtccactacttcaagggctggttcctcatcgacatggtggccgccatccccttcgacctgctcatcttcggctctggctctgaggagctgatcgggctgctgaagactgcgcggctgctgcggctggtgcgcgtggcgcggaagctggatcgctactcagagtacggcgcggccgtgctgttcttgctcatgtgcacctttgcgctcatcgcgcactggctagcctgcatctggtacgccatcggcaacatggagcagccacacatggactcacgcatcggctggctgcacaacctgggcgaccagataggcaaaccctacaacagcagcggcctgggcggcccctccatcaaggacaagtatgtgacggcgctctacttcaccttcagcagcctcaccagtgtgggcttcggcaacgtctctcccaacaccaactcagagaagatcttctccatctgcgtcatgctcattggctccctcatgtatgctagcatcttcggcaacgtgtcggccatcatccagcggctgtactcgggcacagcccgctaccacacacagatgctgcgggtgcgggagttcatccgcttccaccagatccccaatcccctgcgccagcgcctcgaggagtacttccagcacgcctggtcctacaccaacggcatcgacatgaacgcggtgctgaagggcttccctgagtgcctgcaggctgacatctgcctgcacctgaaccgctcactgctgcagcactgcaaacccttccgaggggccaccaagggctgccttcgggccctggccatgaagttcaagaccacacatgcaccgccaggggacacactggtgcatgctggggacctgctcaccgccctgtacttcatctcccggggctccatcgagatcctgcggggcgacgtcgtcgtggccatcctggggaagaatgacatctttggggagcctctgaacctgtatgcaaggcctggcaagtcgaacggggatgtgcgggccctcacctactgtgacctacacaagatccatcgggacgacctgctggaggtgctggacatgtaccctgagttctccgaccacttctggtccagcctggagatcaccttcaacctgcgagataccaacatgatcccgggctcccccggcagtacggagttagagggtggcttcagtcggcaacgcaagcgcaagttgtccttccgcaggcgcacggacaaggacacggagcagccaggggaggtgtcggccttggggccgggccgggcgggggcagggccgagtagccggggccggccgggggggccgtggggggagagcccgtccagtggcccctccagccctgagagcagtgaggatgagggcccaggccgcagctccagccccctccgcctggtgcccttctccagccccaggccccccggagagccgccgggtggggagcccctgatggaggactgcgagaagagcagcgacacttgcaaccccctgtcaggcgccttctcaggagtgtccaacattttcagcttctggggggacagtcggggccgccagtaccaggagctccctcgatgccccgcccccacccccagcctcctcaacatccccctctccagcccgggtcggcggccccggggcgacgtggagagcaggctggatgccctccagcgccagctcaacaggctggagacccggctgagtgcagacatggccactgtcctgcagctgctacagaggcagatgacgctggtcccgcccgcctacagtgctgtgaccaccccggggcctggccccacttccacatccccgctgttgcccgtcagccccctccccaccctcaccttggactcgctttctcaggtttcccagttcatggcgtgtgaggagctgcccccgggggccccagagcttccccaagaaggccccacacgacgcctctccctaccgggccagctgggggccctcacctcccagcccctgcacagacacggctcggacccgggcagttagtggggctgcccagtgtggacacgtggctcacccagggatcaaggcgctgctgggccgctccccttggaggccctgctcaggaggccctgaccgtggaaggggagaggaactcgaaagcacagctcctcccccagcccttgggaccatcttctcctgcagtcccctgggccccagtgagaggggcaggggcagggccggcagtaggtggggcctgtggtccccccactgccctgagggcattagctggtctaactgcccggaggcacccggccctgggccttaggcacctcaaggacttttctgctatttactgctcttattgttaaggataataattaaggatcatatgaataattaatgaagatgctgatgactatgaataataaataattatcctgaggaga

SEQ ID NO: 992 - DNA, 3884 bp, Homo sapiens
  source 1..3884: mol_type = genomic DNA
  misc_feature 1..3884: note = cDNA of KCNH2 gene SNP c.817C>T (p.Arg273Ter)
atgccggtgcggaggggccacgtcgcgccgcagaacaccttcctggacaccatcatccgcaagtttgagggccagagccgtaagttcatcatcgccaacgctcgggtggagaactgcgccgtcatctactgcaacgacggcttctgcgagctgtgcggctactcgcgggccgaggtgatgcagcgaccctgcacctgcgacttcctgcacgggccgcgcacgcagcgccgcgctgccgcgcagatcgcgcaggcactgctgggcgccgaggagcgcaaagtggaaatcgccttctaccggaaagatgggagctgcttcctatgtctggtggatgtggtgcccgtgaagaacgaggatggggctgtcatcatgttcatcctcaatttcgaggtggtgatggagaaggacatggtggggtccccggctcatgacaccaaccaccggggcccccccaccagctggctggccccaggccgcgccaagaccttccgcctgaagctgcccgcgctgctggcgctgacggcccgggagtcgtcggtgcggtcgggcggcgcgggcggcgcgggcgccccgggggccgtggtggtggacgtggacctgacgcccgcggcacccagcagcgagtcgctggccctggacgaagtgacagccatggacaaccacgtggcagggctcgggcccgcggaggagcggcgtgcgctggtgggtcccggctctccgccccgcagcgcgcccggccagctcccatcgccccgggcgcacagcctcaaccccgacgcctcgggctccagctgcagcctggcccggacgcgctcctgagaaagctgcgccagcgtgcgccgcgcctcgtcggccgacgacatcgaggccatgcgcgccggggtgctgcccccgccaccgcgccacgccagcaccggggccatgcacccactgcgcagcggcttgctcaactccacctcggactccgacctcgtgcgctaccgcaccattagcaagattccccaaatcaccctcaactttgtggacctcaagggcgaccccttcttggcttcgcccaccagtgaccgtgagatcatagcacctaagataaaggagcgaacccacaatgtcactgagaaggtcacccaggtcctgtccctgggcgccgacgtgctgcctgagtacaagctgcaggcaccgcgcatccaccgctggaccatcctgcattacagccccttcaaggccgtgtgggactggctcatcctgctgctggtcatctacacggctgtcttcacaccctactcggctgccttcctgctgaaggagacggaagaaggcccgcctgctaccgagtgtggctacgcctgccagccgctggctgtggtggacctcatcgtggacatcatgttcattgtggacatcctcatcaacttccgcaccacctacgtcaatgccaacgaggaggtggtcagccaccccggccgcatcgccgtccactacttcaagggctggttcctcatcgacatggtggccgccatccccttcgacctgctcatcttcggctctggctctgaggagctgatcgggctgctgaagactgcgcggctgctgcggctggtgcgcgtggcgcggaagctggatcgctactcagagtacggcgcggccgtgctgttcttgctcatgtgcacctttgcgctcatcgcgcactggctagcctgcatctggtacgccatcggcaacatggagcagccacacatggactcacgcatcggctggctgcacaacctgggcgaccagataggcaaaccctacaacagcagcggcctgggcggcccctccatcaaggacaagtatgtgacggcgctctacttcaccttcagcagcctcaccagtgtgggcttcggcaacgtctctcccaacaccaactcagagaagatcttctccatctgcgtcatgctcattggctccctcatgtatgctagcatcttcggcaacgtgtcggccatcatccagcggctgtactcgggcacagcccgctaccacacacagatgctgcgggtgcgggagttcatccgcttccaccagatccccaatcccctgcgccagcgcctcgaggagtacttccagcacgcctggtcctacaccaacggcatcgacatgaacgcggtgctgaagggcttccctgagtgcctgcaggctgacatctgcctgcacctgaaccgctcactgctgcagcactgcaaacccttccgaggggccaccaagggctgccttcgggccctggccatgaagttcaagaccacacatgcaccgccaggggacacactggtgcatgctggggacctgctcaccgccctgtacttcatctcccggggctccatcgagatcctgcggggcgacgtcgtcgtggccatcctggggaagaatgacatctttggggagcctctgaacctgtatgcaaggcctggcaagtcgaacggggatgtgcgggccctcacctactgtgacctacacaagatccatcgggacgacctgctggaggtgctggacatgtaccctgagttctccgaccacttctggtccagcctggagatcaccttcaacctgcgagataccaacatgatcccgggctcccccggcagtacggagttagagggtggcttcagtcggcaacgcaagcgcaagttgtccttccgcaggcgcacggacaaggacacggagcagccaggggaggtgtcggccttggggccgggccgggcgggggcagggccgagtagccggggccggccgggggggccgtggggggagagcccgtccagtggcccctccagccctgagagcagtgaggatgagggcccaggccgcagctccagccccctccgcctggtgcccttctccagccccaggccccccggagagccgccgggtggggagcccctgatggaggactgcgagaagagcagcgacacttgcaaccccctgtcaggcgccttctcaggagtgtccaacattttcagcttctggggggacagtcggggccgccagtaccaggagctccctcgatgccccgcccccacccccagcctcctcaacatccccctctccagcccgggtcggcggccccggggcgacgtggagagcaggctggatgccctccagcgccagctcaacaggctggagacccggctgagtgcagacatggccactgtcctgcagctgctacagaggcagatgacgctggtcccgcccgcctacagtgctgtgaccaccccggggcctggccccacttccacatccccgctgttgcccgtcagccccctccccaccctcaccttggactcgctttctcaggtttcccagttcatggcgtgtgaggagctgcccccgggggccccagagcttccccaagaaggccccacacgacgcctctccctaccgggccagctgggggccctcacctcccagcccctgcacagacacggctcggacccgggcagttagtggggctgcccagtgtggacacgtggctcacccagggatcaaggcgctgctgggccgctccccttggaggccctgctcaggaggccctgaccgtggaaggggagaggaactcgaaagcacagctcctcccccagcccttgggaccatcttctcctgcagtcccctgggccccagtgagaggggcaggggcagggccggcagtaggtggggcctgtggtccccccactgccctgagggcattagctggtctaactgcccggaggcacccggccctgggccttaggcacctcaaggacttttctgctatttactgctcttattgttaaggataataattaaggatcatatgaataattaatgaagatgctgatgactatgaataataaataattatcctgaggaga

SEQ ID NO: 993 - DNA, 3884 bp, Homo sapiens
  source 1..3884: mol_type = genomic DNA
  misc_feature 1..3884: note = cDNA of KCNH2 gene SNP c.818G>A (p.Arg273Gln)
atgccggtgcggaggggccacgtcgcgccgcagaacaccttcctggacaccatcatccgcaagtttgagggccagagccgtaagttcatcatcgccaacgctcgggtggagaactgcgccgtcatctactgcaacgacggcttctgcgagctgtgcggctactcgcgggccgaggtgatgcagcgaccctgcacctgcgacttcctgcacgggccgcgcacgcagcgccgcgctgccgcgcagatcgcgcaggcactgctgggcgccgaggagcgcaaagtggaaatcgccttctaccggaaagatgggagctgcttcctatgtctggtggatgtggtgcccgtgaagaacgaggatggggctgtcatcatgttcatcctcaatttcgaggtggtgatggagaaggacatggtggggtccccggctcatgacaccaaccaccggggcccccccaccagctggctggccccaggccgcgccaagaccttccgcctgaagctgcccgcgctgctggcgctgacggcccgggagtcgtcggtgcggtcgggcggcgcgggcggcgcgggcgccccgggggccgtggtggtggacgtggacctgacgcccgcggcacccagcagcgagtcgctggccctggacgaagtgacagccatggacaaccacgtggcagggctcgggcccgcggaggagcggcgtgcgctggtgggtcccggctctccgccccgcagcgcgcccggccagctcccatcgccccgggcgcacagcctcaaccccgacgcctcgggctccagctgcagcctggcccggacgcgctcccaagaaagctgcgccagcgtgcgccgcgcctcgtcggccgacgacatcgaggccatgcgcgccggggtgctgcccccgccaccgcgccacgccagcaccggggccatgcacccactgcgcagcggcttgctcaactccacctcggactccgacctcgtgcgctaccgcaccattagcaagattccccaaatcaccctcaactttgtggacctcaagggcgaccccttcttggcttcgcccaccagtgaccgtgagatcatagcacctaagataaaggagcgaacccacaatgtcactgagaaggtcacccaggtcctgtccctgggcgccgacgtgctgcctgagtacaagctgcaggcaccgcgcatccaccgctggaccatcctgcattacagccccttcaaggccgtgtgggactggctcatcctgctgctggtcatctacacggctgtcttcacaccctactcggctgccttcctgctgaaggagacggaagaaggcccgcctgctaccgagtgtggctacgcctgccagccgctggctgtggtggacctcatcgtggacatcatgttcattgtggacatcctcatcaacttccgcaccacctacgtcaatgccaacgaggaggtggtcagccaccccggccgcatcgccgtccactacttcaagggctggttcctcatcgacatggtggccgccatccccttcgacctgctcatcttcggctctggctctgaggagctgatcgggctgctgaagactgcgcggctgctgcggctggtgcgcgtggcgcggaagctggatcgctactcagagtacggcgcggccgtgctgttcttgctcatgtgcacctttgcgctcatcgcgcactggctagcctgcatctggtacgccatcggcaacatggagcagccacacatggactcacgcatcggctggctgcacaacctgggcgaccagataggcaaaccctacaacagcagcggcctgggcggcccctccatcaaggacaagtatgtgacggcgctctacttcaccttcagcagcctcaccagtgtgggcttcggcaacgtctctcccaacaccaactcagagaagatcttctccatctgcgtcatgctcattggctccctcatgtatgctagcatcttcggcaacgtgtcggccatcatccagcggctgtactcgggcacagcccgctaccacacacagatgctgcgggtgcgggagttcatccgcttccaccagatccccaatcccctgcgccagcgcctcgaggagtacttccagcacgcctggtcctacaccaacggcatcgacatgaacgcggtgctgaagggcttccctgagtgcctgcaggctgacatctgcctgcacctgaaccgctcactgctgcagcactgcaaacccttccgaggggccaccaagggctgccttcgggccctggccatgaagttcaagaccacacatgcaccgccaggggacacactggtgcatgctggggacctgctcaccgccctgtacttcatctcccggggctccatcgagatcctgcggggcgacgtcgtcgtggccatcctggggaagaatgacatctttggggagcctctgaacctgtatgcaaggcctggcaagtcgaacggggatgtgcgggccctcacctactgtgacctacacaagatccatcgggacgacctgctggaggtgctggacatgtaccctgagttctccgaccacttctggtccagcctggagatcaccttcaacctgcgagataccaacatgatcccgggctcccccggcagtacggagttagagggtggcttcagtcggcaacgcaagcgcaagttgtccttccgcaggcgcacggacaaggacacggagcagccaggggaggtgtcggccttggggccgggccgggcgggggcagggccgagtagccggggccggccgggggggccgtggggggagagcccgtccagtggcccctccagccctgagagcagtgaggatgagggcccaggccgcagctccagccccctccgcctggtgcccttctccagccccaggccccccggagagccgccgggtggggagcccctgatggaggactgcgagaagagcagcgacacttgcaaccccctgtcaggcgccttctcaggagtgtccaacattttcagcttctggggggacagtcggggccgccagtaccaggagctccctcgatgccccgcccccacccccagcctcctcaacatccccctctccagcccgggtcggcggccccggggcgacgtggagagcaggctggatgccctccagcgccagctcaacaggctggagacccggctgagtgcagacatggccactgtcctgcagctgctacagaggcagatgacgctggtcccgcccgcctacagtgctgtgaccaccccggggcctggccccacttccacatccccgctgttgcccgtcagccccctccccaccctcaccttggactcgctttctcaggtttcccagttcatggcgtgtgaggagctgcccccgggggccccagagcttccccaagaaggccccacacgacgcctctccctaccgggccagctgggggccctcacctcccagcccctgcacagacacggctcggacccgggcagttagtggggctgcccagtgtggacacgtggctcacccagggatcaaggcgctgctgggccgctccccttggaggccctgctcaggaggccctgaccgtggaaggggagaggaactcgaaagcacagctcctcccccagcccttgggaccatcttctcctgcagtcccctgggccccagtgagaggggcaggggcagggccggcagtaggtggggcctgtggtccccccactgccctgagggcattagctggtctaactgcccggaggcacccggccctgggccttaggcacctcaaggacttttctgctatttactgctcttattgttaaggataataattaaggatcatatgaataattaatgaagatgctgatgactatgaataataaataattatcctgaggaga

SEQ ID NO: 994 - DNA, 3884 bp, Homo sapiens
  source 1..3884: mol_type = genomic DNA
  misc_feature 1..3884: note = cDNA of KCNH2 gene SNP c.823A>C (p.Ser275Arg)
atgccggtgcggaggggccacgtcgcgccgcagaacaccttcctggacaccatcatccgcaagtttgagggccagagccgtaagttcatcatcgccaacgctcgggtggagaactgcgccgtcatctactgcaacgacggcttctgcgagctgtgcggctactcgcgggccgaggtgatgcagcgaccctgcacctgcgacttcctgcacgggccgcgcacgcagcgccgcgctgccgcgcagatcgcgcaggcactgctgggcgccgaggagcgcaaagtggaaatcgccttctaccggaaagatgggagctgcttcctatgtctggtggatgtggtgcccgtgaagaacgaggatggggctgtcatcatgttcatcctcaatttcgaggtggtgatggagaaggacatggtggggtccccggctcatgacaccaaccaccggggcccccccaccagctggctggccccaggccgcgccaagaccttccgcctgaagctgcccgcgctgctggcgctgacggcccgggagtcgtcggtgcggtcgggcggcgcgggcggcgcgggcgccccgggggccgtggtggtggacgtggacctgacgcccgcggcacccagcagcgagtcgctggccctggacgaagtgacagccatggacaaccacgtggcagggctcgggcccgcggaggagcggcgtgcgctggtgggtcccggctctccgccccgcagcgcgcccggccagctcccatcgccccgggcgcacagcctcaaccccgacgcctcgggctccagctgcagcctggcccggacgcgctcccgagaacgctgcgccagcgtgcgccgcgcctcgtcggccgacgacatcgaggccatgcgcgccggggtgctgcccccgccaccgcgccacgccagcaccggggccatgcacccactgcgcagcggcttgctcaactccacctcggactccgacctcgtgcgctaccgcaccattagcaagattccccaaatcaccctcaactttgtggacctcaagggcgaccccttcttggcttcgcccaccagtgaccgtgagatcatagcacctaagataaaggagcgaacccacaatgtcactgagaaggtcacccaggtcctgtccctgggcgccgacgtgctgcctgagtacaagctgcaggcaccgcgcatccaccgctggaccatcctgcattacagccccttcaaggccgtgtgggactggctcatcctgctgctggtcatctacacggctgtcttcacaccctactcggctgccttcctgctgaaggagacggaagaaggcccgcctgctaccgagtgtggctacgcctgccagccgctggctgtggtggacctcatcgtggacatcatgttcattgtggacatcctcatcaacttccgcaccacctacgtcaatgccaacgaggaggtggtcagccaccccggccgcatcgccgtccactacttcaagggctggttcctcatcgacatggtggccgccatccccttcgacctgctcatcttcggctctggctctgaggagctgatcgggctgctgaagactgcgcggctgctgcggctggtgcgcgtggcgcggaagctggatcgctactcagagtacggcgcggccgtgctgttcttgctcatgtgcacctttgcgctcatcgcgcactggctagcctgcatctggtacgccatcggcaacatggagcagccacacatggactcacgcatcggctggctgcacaacctgggcgaccagataggcaaaccctacaacagcagcggcctgggcggcccctccatcaaggacaagtatgtgacggcgctctacttcaccttcagcagcctcaccagtgtgggcttcggcaacgtctctcccaacaccaactcagagaagatcttctccatctgcgtcatgctcattggctccctcatgtatgctagcatcttcggcaacgtgtcggccatcatccagcggctgtactcgggcacagcccgctaccacacacagatgctgcgggtgcgggagttcatccgcttccaccagatccccaatcccctgcgccagcgcctcgaggagtacttccagcacgcctggtcctacaccaacggcatcgacatgaacgcggtgctgaagggcttccctgagtgcctgcaggctgacatctgcctgcacctgaaccgctcactgctgcagcactgcaaacccttccgaggggccaccaagggctgccttcgggccctggccatgaagttcaagaccacacatgcaccgccaggggacacactggtgcatgctggggacctgctcaccgccctgtacttcatctcccggggctccatcgagatcctgcggggcgacgtcgtcgtggccatcctggggaagaatgacatctttggggagcctctgaacctgtatgcaaggcctggcaagtcgaacggggatgtgcgggccctcacctactgtgacctacacaagatccatcgggacgacctgctggaggtgctggacatgtaccctgagttctccgaccacttctggtccagcctggagatcaccttcaacctgcgagataccaacatgatcccgggctcccccggcagtacggagttagagggtggcttcagtcggcaacgcaagcgcaagttgtccttccgcaggcgcacggacaaggacacggagcagccaggggaggtgtcggccttggggccgggccgggcgggggcagggccgagtagccggggccggccgggggggccgtggggggagagcccgtccagtggcccctccagccctgagagcagtgaggatgagggcccaggccgcagctccagccccctccgcctggtgcccttctccagccccaggccccccggagagccgccgggtggggagcccctgatggaggactgcgagaagagcagcgacacttgcaaccccctgtcaggcgccttctcaggagtgtccaacattttcagcttctggggggacagtcggggccgccagtaccaggagctccctcgatgccccgcccccacccccagcctcctcaacatccccctctccagcccgggtcggcggccccggggcgacgtggagagcaggctggatgccctccagcgccagctcaacaggctggagacccggctgagtgcagacatggccactgtcctgcagctgctacagaggcagatgacgctggtcccgcccgcctacagtgctgtgaccaccccggggcctggccccacttccacatccccgctgttgcccgtcagccccctccccaccctcaccttggactcgctttctcaggtttcccagttcatggcgtgtgaggagctgcccccgggggccccagagcttccccaagaaggccccacacgacgcctctccctaccgggccagctgggggccctcacctcccagcccctgcacagacacggctcggacccgggcagttagtggggctgcccagtgtggacacgtggctcacccagggatcaaggcgctgctgggccgctccccttggaggccctgctcaggaggccctgaccgtggaaggggagaggaactcgaaagcacagctcctcccccagcccttgggaccatcttctcctgcagtcccctgggccccagtgagaggggcaggggcagggccggcagtaggtggggcctgtggtccccccactgccctgagggcattagctggtctaactgcccggaggcacccggccctgggccttaggcacctcaaggacttttctgctatttactgctcttattgttaaggataataattaaggatcatatgaataattaatgaagatgctgatgactatgaataataaataattatcctgaggaga

SEQ ID NO: 995 - DNA, 3884 bp, Homo sapiens
  source 1..3884: mol_type = genomic DNA
  misc_feature 1..3884: note = cDNA of KCNH2 gene SNP c.825C>G (p.Ser275Arg)
atgccggtgcggaggggccacgtcgcgccgcagaacaccttcctggacaccatcatccgcaagtttgagggccagagccgtaagttcatcatcgccaacgctcgggtggagaactgcgccgtcatctactgcaacgacggcttctgcgagctgtgcggctactcgcgggccgaggtgatgcagcgaccctgcacctgcgacttcctgcacgggccgcgcacgcagcgccgcgctgccgcgcagatcgcgcaggcactgctgggcgccgaggagcgcaaagtggaaatcgccttctaccggaaagatgggagctgcttcctatgtctggtggatgtggtgcccgtgaagaacgaggatggggctgtcatcatgttcatcctcaatttcgaggtggtgatggagaaggacatggtggggtccccggctcatgacaccaaccaccggggcccccccaccagctggctggccccaggccgcgccaagaccttccgcctgaagctgcccgcgctgctggcgctgacggcccgggagtcgtcggtgcggtcgggcggcgcgggcggcgcgggcgccccgggggccgtggtggtggacgtggacctgacgcccgcggcacccagcagcgagtcgctggccctggacgaagtgacagccatggacaaccacgtggcagggctcgggcccgcggaggagcggcgtgcgctggtgggtcccggctctccgccccgcagcgcgcccggccagctcccatcgccccgggcgcacagcctcaaccccgacgcctcgggctccagctgcagcctggcccggacgcgctcccgagaaaggtgcgccagcgtgcgccgcgcctcgtcggccgacgacatcgaggccatgcgcgccggggtgctgcccccgccaccgcgccacgccagcaccggggccatgcacccactgcgcagcggcttgctcaactccacctcggactccgacctcgtgcgctaccgcaccattagcaagattccccaaatcaccctcaactttgtggacctcaagggcgaccccttcttggcttcgcccaccagtgaccgtgagatcatagcacctaagataaaggagcgaacccacaatgtcactgagaaggtcacccaggtcctgtccctgggcgccgacgtgctgcctgagtacaagctgcaggcaccgcgcatccaccgctggaccatcctgcattacagccccttcaaggccgtgtgggactggctcatcctgctgctggtcatctacacggctgtcttcacaccctactcggctgccttcctgctgaaggagacggaagaaggcccgcctgctaccgagtgtggctacgcctgccagccgctggctgtggtggacctcatcgtggacatcatgttcattgtggacatcctcatcaacttccgcaccacctacgtcaatgccaacgaggaggtggtcagccaccccggccgcatcgccgtccactacttcaagggctggttcctcatcgacatggtggccgccatccccttcgacctgctcatcttcggctctggctctgaggagctgatcgggctgctgaagactgcgcggctgctgcggctggtgcgcgtggcgcggaagctggatcgctactcagagtacggcgcggccgtgctgttcttgctcatgtgcacctttgcgctcatcgcgcactggctagcctgcatctggtacgccatcggcaacatggagcagccacacatggactcacgcatcggctggctgcacaacctgggcgaccagataggcaaaccctacaacagcagcggcctgggcggcccctccatcaaggacaagtatgtgacggcgctctacttcaccttcagcagcctcaccagtgtgggcttcggcaacgtctctcccaacaccaactcagagaagatcttctccatctgcgtcatgctcattggctccctcatgtatgctagcatcttcggcaacgtgtcggccatcatccagcggctgtactcgggcacagcccgctaccacacacagatgctgcgggtgcgggagttcatccgcttccaccagatccccaatcccctgcgccagcgcctcgaggagtacttccagcacgcctggtcctacaccaacggcatcgacatgaacgcggtgctgaagggcttccctgagtgcctgcaggctgacatctgcctgcacctgaaccgctcactgctgcagcactgcaaacccttccgaggggccaccaagggctgccttcgggccctggccatgaagttcaagaccacacatgcaccgccaggggacacactggtgcatgctggggacctgctcaccgccctgtacttcatctcccggggctccatcgagatcctgcggggcgacgtcgtcgtggccatcctggggaagaatgacatctttggggagcctctgaacctgtatgcaaggcctggcaagtcgaacggggatgtgcgggccctcacctactgtgacctacacaagatccatcgggacgacctgctggaggtgctggacatgtaccctgagttctccgaccacttctggtccagcctggagatcaccttcaacctgcgagataccaacatgatcccgggctcccccggcagtacggagttagagggtggcttcagtcggcaacgcaagcgcaagttgtccttccgcaggcgcacggacaaggacacggagcagccaggggaggtgtcggccttggggccgggccgggcgggggcagggccgagtagccggggccggccgggggggccgtggggggagagcccgtccagtggcccctccagccctgagagcagtgaggatgagggcccaggccgcagctccagccccctccgcctggtgcccttctccagccccaggccccccggagagccgccgggtggggagcccctgatggaggactgcgagaagagcagcgacacttgcaaccccctgtcaggcgccttctcaggagtgtccaacattttcagcttctggggggacagtcggggccgccagtaccaggagctccctcgatgccccgcccccacccccagcctcctcaacatccccctctccagcccgggtcggcggccccggggcgacgtggagagcaggctggatgccctccagcgccagctcaacaggctggagacccggctgagtgcagacatggccactgtcctgcagctgctacagaggcagatgacgctggtcccgcccgcctacagtgctgtgaccaccccggggcctggccccacttccacatccccgctgttgcccgtcagccccctccccaccctcaccttggactcgctttctcaggtttcccagttcatggcgtgtgaggagctgcccccgggggccccagagcttccccaagaaggccccacacgacgcctctccctaccgggccagctgggggccctcacctcccagcccctgcacagacacggctcggacccgggcagttagtggggctgcccagtgtggacacgtggctcacccagggatcaaggcgctgctgggccgctccccttggaggccctgctcaggaggccctgaccgtggaaggggagaggaactcgaaagcacagctcctcccccagcccttgggaccatcttctcctgcagtcccctgggccccagtgagaggggcaggggcagggccggcagtaggtggggcctgtggtccccccactgccctgagggcattagctggtctaactgcccggaggcacccggccctgggccttaggcacctcaaggacttttctgctatttactgctcttattgttaaggataataattaaggatcatatgaataattaatgaagatgctgatgactatgaataataaataattatcctgaggaga

SEQ ID NO: 996 - DNA, 3884 bp, Homo sapiens
  source 1..3884: mol_type = genomic DNA
  misc_feature 1..3884: note = cDNA of KCNH2 gene SNP c.829G>T (p.Ala277Ser)
atgccggtgcggaggggccacgtcgcgccgcagaacaccttcctggacaccatcatccgcaagtttgagggccagagccgtaagttcatcatcgccaacgctcgggtggagaactgcgccgtcatctactgcaacgacggcttctgcgagctgtgcggctactcgcgggccgaggtgatgcagcgaccctgcacctgcgacttcctgcacgggccgcgcacgcagcgccgcgctgccgcgcagatcgcgcaggcactgctgggcgccgaggagcgcaaagtggaaatcgccttctaccggaaagatgggagctgcttcctatgtctggtggatgtggtgcccgtgaagaacgaggatggggctgtcatcatgttcatcctcaatttcgaggtggtgatggagaaggacatggtggggtccccggctcatgacaccaaccaccggggcccccccaccagctggctggccccaggccgcgccaagaccttccgcctgaagctgcccgcgctgctggcgctgacggcccgggagtcgtcggtgcggtcgggcggcgcgggcggcgcgggcgccccgggggccgtggtggtggacgtggacctgacgcccgcggcacccagcagcgagtcgctggccctggacgaagtgacagccatggacaaccacgtggcagggctcgggcccgcggaggagcggcgtgcgctggtgggtcccggctctccgccccgcagcgcgcccggccagctcccatcgccccgggcgcacagcctcaaccccgacgcctcgggctccagctgcagcctggcccggacgcgctcccgagaaagctgctccagcgtgcgccgcgcctcgtcggccgacgacatcgaggccatgcgcgccggggtgctgcccccgccaccgcgccacgccagcaccggggccatgcacccactgcgcagcggcttgctcaactccacctcggactccgacctcgtgcgctaccgcaccattagcaagattccccaaatcaccctcaactttgtggacctcaagggcgaccccttcttggcttcgcccaccagtgaccgtgagatcatagcacctaagataaaggagcgaacccacaatgtcactgagaaggtcacccaggtcctgtccctgggcgccgacgtgctgcctgagtacaagctgcaggcaccgcgcatccaccgctggaccatcctgcattacagccccttcaaggccgtgtgggactggctcatcctgctgctggtcatctacacggctgtcttcacaccctactcggctgccttcctgctgaaggagacggaagaaggcccgcctgctaccgagtgtggctacgcctgccagccgctggctgtggtggacctcatcgtggacatcatgttcattgtggacatcctcatcaacttccgcaccacctacgtcaatgccaacgaggaggtggtcagccaccccggccgcatcgccgtccactacttcaagggctggttcctcatcgacatggtggccgccatccccttcgacctgctcatcttcggctctggctctgaggagctgatcgggctgctgaagactgcgcggctgctgcggctggtgcgcgtggcgcggaagctggatcgctactcagagtacggcgcggccgtgctgttcttgctcatgtgcacctttgcgctcatcgcgcactggctagcctgcatctggtacgccatcggcaacatggagcagccacacatggactcacgcatcggctggctgcacaacctgggcgaccagataggcaaaccctacaacagcagcggcctgggcggcccctccatcaaggacaagtatgtgacggcgctctacttcaccttcagcagcctcaccagtgtgggcttcggcaacgtctctcccaacaccaactcagagaagatcttctccatctgcgtcatgctcattggctccctcatgtatgctagcatcttcggcaacgtgtcggccatcatccagcggctgtactcgggcacagcccgctaccacacacagatgctgcgggtgcgggagttcatccgcttccaccagatccccaatcccctgcgccagcgcctcgaggagtacttccagcacgcctggtcctacaccaacggcatcgacatgaacgcggtgctgaagggcttccctgagtgcctgcaggctgacatctgcctgcacctgaaccgctcactgctgcagcactgcaaacccttccgaggggccaccaagggctgccttcgggccctggccatgaagttcaagaccacacatgcaccgccaggggacacactggtgcatgctggggacctgctcaccgccctgtacttcatctcccggggctccatcgagatcctgcggggcgacgtcgtcgtggccatcctggggaagaatgacatctttggggagcctctgaacctgtatgcaaggcctggcaagtcgaacggggatgtgcgggccctcacctactgtgacctacacaagatccatcgggacgacctgctggaggtgctggacatgtaccctgagttctccgaccacttctggtccagcctggagatcaccttcaacctgcgagataccaacatgatcccgggctcccccggcagtacggagttagagggtggcttcagtcggcaacgcaagcgcaagttgtccttccgcaggcgcacggacaaggacacggagcagccaggggaggtgtcggccttggggccgggccgggcgggggcagggccgagtagccggggccggccgggggggccgtggggggagagcccgtccagtggcccctccagccctgagagcagtgaggatgagggcccaggccgcagctccagccccctccgcctggtgcccttctccagccccaggccccccggagagccgccgggtggggagcccctgatggaggactgcgagaagagcagcgacacttgcaaccccctgtcaggcgccttctcaggagtgtccaacattttcagcttctggggggacagtcggggccgccagtaccaggagctccctcgatgccccgcccccacccccagcctcctcaacatccccctctccagcccgggtcggcggccccggggcgacgtggagagcaggctggatgccctccagcgccagctcaacaggctggagacccggctgagtgcagacatggccactgtcctgcagctgctacagaggcagatgacgctggtcccgcccgcctacagtgctgtgaccaccccggggcctggccccacttccacatccccgctgttgcccgtcagccccctccccaccctcaccttggactcgctttctcaggtttcccagttcatggcgtgtgaggagctgcccccgggggccccagagcttccccaagaaggccccacacgacgcctctccctaccgggccagctgggggccctcacctcccagcccctgcacagacacggctcggacccgggcagttagtggggctgcccagtgtggacacgtggctcacccagggatcaaggcgctgctgggccgctccccttggaggccctgctcaggaggccctgaccgtggaaggggagaggaactcgaaagcacagctcctcccccagcccttgggaccatcttctcctgcagtcccctgggccccagtgagaggggcaggggcagggccggcagtaggtggggcctgtggtccccccactgccctgagggcattagctggtctaactgcccggaggcacccggccctgggccttaggcacctcaaggacttttctgctatttactgctcttattgttaaggataataattaaggatcatatgaataattaatgaagatgctgatgactatgaataataaataattatcctgaggaga

SEQ ID NO: 997 - DNA, 3884 bp, Homo sapiens
  source 1..3884: mol_type = genomic DNA
  misc_feature 1..3884: note = cDNA of KCNH2 gene SNP c.82A>G (p.Lys28Glu)
atgccggtgcggaggggccacgtcgcgccgcagaacaccttcctggacaccatcatccgcaagtttgagggccagagccgtgagttcatcatcgccaacgctcgggtggagaactgcgccgtcatctactgcaacgacggcttctgcgagctgtgcggctactcgcgggccgaggtgatgcagcgaccctgcacctgcgacttcctgcacgggccgcgcacgcagcgccgcgctgccgcgcagatcgcgcaggcactgctgggcgccgaggagcgcaaagtggaaatcgccttctaccggaaagatgggagctgcttcctatgtctggtggatgtggtgcccgtgaagaacgaggatggggctgtcatcatgttcatcctcaatttcgaggtggtgatggagaaggacatggtggggtccccggctcatgacaccaaccaccggggcccccccaccagctggctggccccaggccgcgccaagaccttccgcctgaagctgcccgcgctgctggcgctgacggcccgggagtcgtcggtgcggtcgggcggcgcgggcggcgcgggcgccccgggggccgtggtggtggacgtggacctgacgcccgcggcacccagcagcgagtcgctggccctggacgaagtgacagccatggacaaccacgtggcagggctcgggcccgcggaggagcggcgtgcgctggtgggtcccggctctccgccccgcagcgcgcccggccagctcccatcgccccgggcgcacagcctcaaccccgacgcctcgggctccagctgcagcctggcccggacgcgctcccgagaaagctgcgccagcgtgcgccgcgcctcgtcggccgacgacatcgaggccatgcgcgccggggtgctgcccccgccaccgcgccacgccagcaccggggccatgcacccactgcgcagcggcttgctcaactccacctcggactccgacctcgtgcgctaccgcaccattagcaagattccccaaatcaccctcaactttgtggacctcaagggcgaccccttcttggcttcgcccaccagtgaccgtgagatcatagcacctaagataaaggagcgaacccacaatgtcactgagaaggtcacccaggtcctgtccctgggcgccgacgtgctgcctgagtacaagctgcaggcaccgcgcatccaccgctggaccatcctgcattacagccccttcaaggccgtgtgggactggctcatcctgctgctggtcatctacacggctgtcttcacaccctactcggctgccttcctgctgaaggagacggaagaaggcccgcctgctaccgagtgtggctacgcctgccagccgctggctgtggtggacctcatcgtggacatcatgttcattgtggacatcctcatcaacttccgcaccacctacgtcaatgccaacgaggaggtggtcagccaccccggccgcatcgccgtccactacttcaagggctggttcctcatcgacatggtggccgccatccccttcgacctgctcatcttcggctctggctctgaggagctgatcgggctgctgaagactgcgcggctgctgcggctggtgcgcgtggcgcggaagctggatcgctactcagagtacggcgcggccgtgctgttcttgctcatgtgcacctttgcgctcatcgcgcactggctagcctgcatctggtacgccatcggcaacatggagcagccacacatggactcacgcatcggctggctgcacaacctgggcgaccagataggcaaaccctacaacagcagcggcctgggcggcccctccatcaaggacaagtatgtgacggcgctctacttcaccttcagcagcctcaccagtgtgggcttcggcaacgtctctcccaacaccaactcagagaagatcttctccatctgcgtcatgctcattggctccctcatgtatgctagcatcttcggcaacgtgtcggccatcatccagcggctgtactcgggcacagcccgctaccacacacagatgctgcgggtgcgggagttcatccgcttccaccagatccccaatcccctgcgccagcgcctcgaggagtacttccagcacgcctggtcctacaccaacggcatcgacatgaacgcggtgctgaagggcttccctgagtgcctgcaggctgacatctgcctgcacctgaaccgctcactgctgcagcactgcaaacccttccgaggggccaccaagggctgccttcgggccctggccatgaagttcaagaccacacatgcaccgccaggggacacactggtgcatgctggggacctgctcaccgccctgtacttcatctcccggggctccatcgagatcctgcggggcgacgtcgtcgtggccatcctggggaagaatgacatctttggggagcctctgaacctgtatgcaaggcctggcaagtcgaacggggatgtgcgggccctcacctactgtgacctacacaagatccatcgggacgacctgctggaggtgctggacatgtaccctgagttctccgaccacttctggtccagcctggagatcaccttcaacctgcgagataccaacatgatcccgggctcccccggcagtacggagttagagggtggcttcagtcggcaacgcaagcgcaagttgtccttccgcaggcgcacggacaaggacacggagcagccaggggaggtgtcggccttggggccgggccgggcgggggcagggccgagtagccggggccggccgggggggccgtggggggagagcccgtccagtggcccctccagccctgagagcagtgaggatgagggcccaggccgcagctccagccccctccgcctggtgcccttctccagccccaggccccccggagagccgccgggtggggagcccctgatggaggactgcgagaagagcagcgacacttgcaaccccctgtcaggcgccttctcaggagtgtccaacattttcagcttctggggggacagtcggggccgccagtaccaggagctccctcgatgccccgcccccacccccagcctcctcaacatccccctctccagcccgggtcggcggccccggggcgacgtggagagcaggctggatgccctccagcgccagctcaacaggctggagacccggctgagtgcagacatggccactgtcctgcagctgctacagaggcagatgacgctggtcccgcccgcctacagtgctgtgaccaccccggggcctggccccacttccacatccccgctgttgcccgtcagccccctccccaccctcaccttggactcgctttctcaggtttcccagttcatggcgtgtgaggagctgcccccgggggccccagagcttccccaagaaggccccacacgacgcctctccctaccgggccagctgggggccctcacctcccagcccctgcacagacacggctcggacccgggcagttagtggggctgcccagtgtggacacgtggctcacccagggatcaaggcgctgctgggccgctccccttggaggccctgctcaggaggccctgaccgtggaaggggagaggaactcgaaagcacagctcctcccccagcccttgggaccatcttctcctgcagtcccctgggccccagtgagaggggcaggggcagggccggcagtaggtggggcctgtggtccccccactgccctgagggcattagctggtctaactgcccggaggcacccggccctgggccttaggcacctcaaggacttttctgctatttactgctcttattgttaaggataataattaaggatcatatgaataattaatgaagatgctgatgactatgaataataaataattatcctgaggaga

SEQ ID NO: 998 - DNA, 3884 bp, Homo sapiens
  source 1..3884: mol_type = genomic DNA
  misc_feature 1..3884: note = cDNA of KCNH2 gene SNP c.830C>A (p.Ala277Asp)
atgccggtgcggaggggccacgtcgcgccgcagaacaccttcctggacaccatcatccgcaagtttgagggccagagccgtaagttcatcatcgccaacgctcgggtggagaactgcgccgtcatctactgcaacgacggcttctgcgagctgtgcggctactcgcgggccgaggtgatgcagcgaccctgcacctgcgacttcctgcacgggccgcgcacgcagcgccgcgctgccgcgcagatcgcgcaggcactgctgggcgccgaggagcgcaaagtggaaatcgccttctaccggaaagatgggagctgcttcctatgtctggtggatgtggtgcccgtgaagaacgaggatggggctgtcatcatgttcatcctcaatttcgaggtggtgatggagaaggacatggtggggtccccggctcatgacaccaaccaccggggcccccccaccagctggctggccccaggccgcgccaagaccttccgcctgaagctgcccgcgctgctggcgctgacggcccgggagtcgtcggtgcggtcgggcggcgcgggcggcgcgggcgccccgggggccgtggtggtggacgtggacctgacgcccgcggcacccagcagcgagtcgctggccctggacgaagtgacagccatggacaaccacgtggcagggctcgggcccgcggaggagcggcgtgcgctggtgggtcccggctctccgccccgcagcgcgcccggccagctcccatcgccccgggcgcacagcctcaaccccgacgcctcgggctccagctgcagcctggcccggacgcgctcccgagaaagctgcgacagcgtgcgccgcgcctcgtcggccgacgacatcgaggccatgcgcgccggggtgctgcccccgccaccgcgccacgccagcaccggggccatgcacccactgcgcagcggcttgctcaactccacctcggactccgacctcgtgcgctaccgcaccattagcaagattccccaaatcaccctcaactttgtggacctcaagggcgaccccttcttggcttcgcccaccagtgaccgtgagatcatagcacctaagataaaggagcgaacccacaatgtcactgagaaggtcacccaggtcctgtccctgggcgccgacgtgctgcctgagtacaagctgcaggcaccgcgcatccaccgctggaccatcctgcattacagccccttcaaggccgtgtgggactggctcatcctgctgctggtcatctacacggctgtcttcacaccctactcggctgccttcctgctgaaggagacggaagaaggcccgcctgctaccgagtgtggctacgcctgccagccgctggctgtggtggacctcatcgtggacatcatgttcattgtggacatcctcatcaacttccgcaccacctacgtcaatgccaacgaggaggtggtcagccaccccggccgcatcgccgtccactacttcaagggctggttcctcatcgacatggtggccgccatccccttcgacctgctcatcttcggctctggctctgaggagctgatcgggctgctgaagactgcgcggctgctgcggctggtgcgcgtggcgcggaagctggatcgctactcagagtacggcgcggccgtgctgttcttgctcatgtgcacctttgcgctcatcgcgcactggctagcctgcatctggtacgccatcggcaacatggagcagccacacatggactcacgcatcggctggctgcacaacctgggcgaccagataggcaaaccctacaacagcagcggcctgggcggcccctccatcaaggacaagtatgtgacggcgctctacttcaccttcagcagcctcaccagtgtgggcttcggcaacgtctctcccaacaccaactcagagaagatcttctccatctgcgtcatgctcattggctccctcatgtatgctagcatcttcggcaacgtgtcggccatcatccagcggctgtactcgggcacagcccgctaccacacacagatgctgcgggtgcgggagttcatccgcttccaccagatccccaatcccctgcgccagcgcctcgaggagtacttccagcacgcctggtcctacaccaacggcatcgacatgaacgcggtgctgaagggcttccctgagtgcctgcaggctgacatctgcctgcacctgaaccgctcactgctgcagcactgcaaacccttccgaggggccaccaagggctgccttcgggccctggccatgaagttcaagaccacacatgcaccgccaggggacacactggtgcatgctggggacctgctcaccgccctgtacttcatctcccggggctccatcgagatcctgcggggcgacgtcgtcgtggccatcctggggaagaatgacatctttggggagcctctgaacctgtatgcaaggcctggcaagtcgaacggggatgtgcgggccctcacctactgtgacctacacaagatccatcgggacgacctgctggaggtgctggacatgtaccctgagttctccgaccacttctggtccagcctggagatcaccttcaacctgcgagataccaacatgatcccgggctcccccggcagtacggagttagagggtggcttcagtcggcaacgcaagcgcaagttgtccttccgcaggcgcacggacaaggacacggagcagccaggggaggtgtcggccttggggccgggccgggcgggggcagggccgagtagccggggccggccgggggggccgtggggggagagcccgtccagtggcccctccagccctgagagcagtgaggatgagggcccaggccgcagctccagccccctccgcctggtgcccttctccagccccaggccccccggagagccgccgggtggggagcccctgatggaggactgcgagaagagcagcgacacttgcaaccccctgtcaggcgccttctcaggagtgtccaacattttcagcttctggggggacagtcggggccgccagtaccaggagctccctcgatgccccgcccccacccccagcctcctcaacatccccctctccagcccgggtcggcggccccggggcgacgtggagagcaggctggatgccctccagcgccagctcaacaggctggagacccggctgagtgcagacatggccactgtcctgcagctgctacagaggcagatgacgctggtcccgcccgcctacagtgctgtgaccaccccggggcctggccccacttccacatccccgctgttgcccgtcagccccctccccaccctcaccttggactcgctttctcaggtttcccagttcatggcgtgtgaggagctgcccccgggggccccagagcttccccaagaaggccccacacgacgcctctccctaccgggccagctgggggccctcacctcccagcccctgcacagacacggctcggacccgggcagttagtggggctgcccagtgtggacacgtggctcacccagggatcaaggcgctgctgggccgctccccttggaggccctgctcaggaggccctgaccgtggaaggggagaggaactcgaaagcacagctcctcccccagcccttgggaccatcttctcctgcagtcccctgggccccagtgagaggggcaggggcagggccggcagtaggtggggcctgtggtccccccactgccctgagggcattagctggtctaactgcccggaggcacccggccctgggccttaggcacctcaaggacttttctgctatttactgctcttattgttaaggataataattaaggatcatatgaataattaatgaagatgctgatgactatgaataataaataattatcctgaggaga

SEQ ID NO: 999 - DNA, 3884 bp, Homo sapiens
  source 1..3884: mol_type = genomic DNA
  misc_feature 1..3884: note = cDNA of KCNH2 gene SNP c.832A>T (p.Ser278Cys)
atgccggtgcggaggggccacgtcgcgccgcagaacaccttcctggacaccatcatccgcaagtttgagggccagagccgtaagttcatcatcgccaacgctcgggtggagaactgcgccgtcatctactgcaacgacggcttctgcgagctgtgcggctactcgcgggccgaggtgatgcagcgaccctgcacctgcgacttcctgcacgggccgcgcacgcagcgccgcgctgccgcgcagatcgcgcaggcactgctgggcgccgaggagcgcaaagtggaaatcgccttctaccggaaagatgggagctgcttcctatgtctggtggatgtggtgcccgtgaagaacgaggatggggctgtcatcatgttcatcctcaatttcgaggtggtgatggagaaggacatggtggggtccccggctcatgacaccaaccaccggggcccccccaccagctggctggccccaggccgcgccaagaccttccgcctgaagctgcccgcgctgctggcgctgacggcccgggagtcgtcggtgcggtcgggcggcgcgggcggcgcgggcgccccgggggccgtggtggtggacgtggacctgacgcccgcggcacccagcagcgagtcgctggccctggacgaagtgacagccatggacaaccacgtggcagggctcgggcccgcggaggagcggcgtgcgctggtgggtcccggctctccgccccgcagcgcgcccggccagctcccatcgccccgggcgcacagcctcaaccccgacgcctcgggctccagctgcagcctggcccggacgcgctcccgagaaagctgcgcctgcgtgcgccgcgcctcgtcggccgacgacatcgaggccatgcgcgccggggtgctgcccccgccaccgcgccacgccagcaccggggccatgcacccactgcgcagcggcttgctcaactccacctcggactccgacctcgtgcgctaccgcaccattagcaagattccccaaatcaccctcaactttgtggacctcaagggcgaccccttcttggcttcgcccaccagtgaccgtgagatcatagcacctaagataaaggagcgaacccacaatgtcactgagaaggtcacccaggtcctgtccctgggcgccgacgtgctgcctgagtacaagctgcaggcaccgcgcatccaccgctggaccatcctgcattacagccccttcaaggccgtgtgggactggctcatcctgctgctggtcatctacacggctgtcttcacaccctactcggctgccttcctgctgaaggagacggaagaaggcccgcctgctaccgagtgtggctacgcctgccagccgctggctgtggtggacctcatcgtggacatcatgttcattgtggacatcctcatcaacttccgcaccacctacgtcaatgccaacgaggaggtggtcagccaccccggccgcatcgccgtccactacttcaagggctggttcctcatcgacatggtggccgccatccccttcgacctgctcatcttcggctctggctctgaggagctgatcgggctgctgaagactgcgcggctgctgcggctggtgcgcgtggcgcggaagctggatcgctactcagagtacggcgcggccgtgctgttcttgctcatgtgcacctttgcgctcatcgcgcactggctagcctgcatctggtacgccatcggcaacatggagcagccacacatggactcacgcatcggctggctgcacaacctgggcgaccagataggcaaaccctacaacagcagcggcctgggcggcccctccatcaaggacaagtatgtgacggcgctctacttcaccttcagcagcctcaccagtgtgggcttcggcaacgtctctcccaacaccaactcagagaagatcttctccatctgcgtcatgctcattggctccctcatgtatgctagcatcttcggcaacgtgtcggccatcatccagcggctgtactcgggcacagcccgctaccacacacagatgctgcgggtgcgggagttcatccgcttccaccagatccccaatcccctgcgccagcgcctcgaggagtacttccagcacgcctggtcctacaccaacggcatcgacatgaacgcggtgctgaagggcttccctgagtgcctgcaggctgacatctgcctgcacctgaaccgctcactgctgcagcactgcaaacccttccgaggggccaccaagggctgccttcgggccctggccatgaagttcaagaccacacatgcaccgccaggggacacactggtgcatgctggggacctgctcaccgccctgtacttcatctcccggggctccatcgagatcctgcggggcgacgtcgtcgtggccatcctggggaagaatgacatctttggggagcctctgaacctgtatgcaaggcctggcaagtcgaacggggatgtgcgggccctcacctactgtgacctacacaagatccatcgggacgacctgctggaggtgctggacatgtaccctgagttctccgaccacttctggtccagcctggagatcaccttcaacctgcgagataccaacatgatcccgggctcccccggcagtacggagttagagggtggcttcagtcggcaacgcaagcgcaagttgtccttccgcaggcgcacggacaaggacacggagcagccaggggaggtgtcggccttggggccgggccgggcgggggcagggccgagtagccggggccggccgggggggccgtggggggagagcccgtccagtggcccctccagccctgagagcagtgaggatgagggcccaggccgcagctccagccccctccgcctggtgcccttctccagccccaggccccccggagagccgccgggtggggagcccctgatggaggactgcgagaagagcagcgacacttgcaaccccctgtcaggcgccttctcaggagtgtccaacattttcagcttctggggggacagtcggggccgccagtaccaggagctccctcgatgccccgcccccacccccagcctcctcaacatccccctctccagcccgggtcggcggccccggggcgacgtggagagcaggctggatgccctccagcgccagctcaacaggctggagacccggctgagtgcagacatggccactgtcctgcagctgctacagaggcagatgacgctggtcccgcccgcctacagtgctgtgaccaccccggggcctggccccacttccacatccccgctgttgcccgtcagccccctccccaccctcaccttggactcgctttctcaggtttcccagttcatggcgtgtgaggagctgcccccgggggccccagagcttccccaagaaggccccacacgacgcctctccctaccgggccagctgggggccctcacctcccagcccctgcacagacacggctcggacccgggcagttagtggggctgcccagtgtggacacgtggctcacccagggatcaaggcgctgctgggccgctccccttggaggccctgctcaggaggccctgaccgtggaaggggagaggaactcgaaagcacagctcctcccccagcccttgggaccatcttctcctgcagtcccctgggccccagtgagaggggcaggggcagggccggcagtaggtggggcctgtggtccccccactgccctgagggcattagctggtctaactgcccggaggcacccggccctgggccttaggcacctcaaggacttttctgctatttactgctcttattgttaaggataataattaaggatcatatgaataattaatgaagatgctgatgactatgaataataaataattatcctgaggaga

SEQ ID NO: 1000 - DNA, 3884 bp, Homo sapiens
  source 1..3884: mol_type = genomic DNA
  misc_feature 1..3884: note = cDNA of KCNH2 gene SNP c.835G>A (p.Val279Met)
atgccggtgcggaggggccacgtcgcgccgcagaacaccttcctggacaccatcatccgcaagtttgagggccagagccgtaagttcatcatcgccaacgctcgggtggagaactgcgccgtcatctactgcaacgacggcttctgcgagctgtgcggctactcgcgggccgaggtgatgcagcgaccctgcacctgcgacttcctgcacgggccgcgcacgcagcgccgcgctgccgcgcagatcgcgcaggcactgctgggcgccgaggagcgcaaagtggaaatcgccttctaccggaaagatgggagctgcttcctatgtctggtggatgtggtgcccgtgaagaacgaggatggggctgtcatcatgttcatcctcaatttcgaggtggtgatggagaaggacatggtggggtccccggctcatgacaccaaccaccggggcccccccaccagctggctggccccaggccgcgccaagaccttccgcctgaagctgcccgcgctgctggcgctgacggcccgggagtcgtcggtgcggtcgggcggcgcgggcggcgcgggcgccccgggggccgtggtggtggacgtggacctgacgcccgcggcacccagcagcgagtcgctggccctggacgaagtgacagccatggacaaccacgtggcagggctcgggcccgcggaggagcggcgtgcgctggtgggtcccggctctccgccccgcagcgcgcccggccagctcccatcgccccgggcgcacagcctcaaccccgacgcctcgggctccagctgcagcctggcccggacgcgctcccgagaaagctgcgccagcatgcgccgcgcctcgtcggccgacgacatcgaggccatgcgcgccggggtgctgcccccgccaccgcgccacgccagcaccggggccatgcacccactgcgcagcggcttgctcaactccacctcggactccgacctcgtgcgctaccgcaccattagcaagattccccaaatcaccctcaactttgtggacctcaagggcgaccccttcttggcttcgcccaccagtgaccgtgagatcatagcacctaagataaaggagcgaacccacaatgtcactgagaaggtcacccaggtcctgtccctgggcgccgacgtgctgcctgagtacaagctgcaggcaccgcgcatccaccgctggaccatcctgcattacagccccttcaaggccgtgtgggactggctcatcctgctgctggtcatctacacggctgtcttcacaccctactcggctgccttcctgctgaaggagacggaagaaggcccgcctgctaccgagtgtggctacgcctgccagccgctggctgtggtggacctcatcgtggacatcatgttcattgtggacatcctcatcaacttccgcaccacctacgtcaatgccaacgaggaggtggtcagccaccccggccgcatcgccgtccactacttcaagggctggttcctcatcgacatggtggccgccatccccttcgacctgctcatcttcggctctggctctgaggagctgatcgggctgctgaagactgcgcggctgctgcggctggtgcgcgtggcgcggaagctggatcgctactcagagtacggcgcggccgtgctgttcttgctcatgtgcacctttgcgctcatcgcgcactggctagcctgcatctggtacgccatcggcaacatggagcagccacacatggactcacgcatcggctggctgcacaacctgggcgaccagataggcaaaccctacaacagcagcggcctgggcggcccctccatcaaggacaagtatgtgacggcgctctacttcaccttcagcagcctcaccagtgtgggcttcggcaacgtctctcccaacaccaactcagagaagatcttctccatctgcgtcatgctcattggctccctcatgtatgctagcatcttcggcaacgtgtcggccatcatccagcggctgtactcgggcacagcccgctaccacacacagatgctgcgggtgcgggagttcatccgcttccaccagatccccaatcccctgcgccagcgcctcgaggagtacttccagcacgcctggtcctacaccaacggcatcgacatgaacgcggtgctgaagggcttccctgagtgcctgcaggctgacatctgcctgcacctgaaccgctcactgctgcagcactgcaaacccttccgaggggccaccaagggctgccttcgggccctggccatgaagttcaagaccacacatgcaccgccaggggacacactggtgcatgctggggacctgctcaccgccctgtacttcatctcccggggctccatcgagatcctgcggggcgacgtcgtcgtggccatcctggggaagaatgacatctttggggagcctctgaacctgtatgcaaggcctggcaagtcgaacggggatgtgcgggccctcacctactgtgacctacacaagatccatcgggacgacctgctggaggtgctggacatgtaccctgagttctccgaccacttctggtccagcctggagatcaccttcaacctgcgagataccaacatgatcccgggctcccccggcagtacggagttagagggtggcttcagtcggcaacgcaagcgcaagttgtccttccgcaggcgcacggacaaggacacggagcagccaggggaggtgtcggccttggggccgggccgggcgggggcagggccgagtagccggggccggccgggggggccgtggggggagagcccgtccagtggcccctccagccctgagagcagtgaggatgagggcccaggccgcagctccagccccctccgcctggtgcccttctccagccccaggccccccggagagccgccgggtggggagcccctgatggaggactgcgagaagagcagcgacacttgcaaccccctgtcaggcgccttctcaggagtgtccaacattttcagcttctggggggacagtcggggccgccagtaccaggagctccctcgatgccccgcccccacccccagcctcctcaacatccccctctccagcccgggtcggcggccccggggcgacgtggagagcaggctggatgccctccagcgccagctcaacaggctggagacccggctgagtgcagacatggccactgtcctgcagctgctacagaggcagatgacgctggtcccgcccgcctacagtgctgtgaccaccccggggcctggccccacttccacatccccgctgttgcccgtcagccccctccccaccctcaccttggactcgctttctcaggtttcccagttcatggcgtgtgaggagctgcccccgggggccccagagcttccccaagaaggccccacacgacgcctctccctaccgggccagctgggggccctcacctcccagcccctgcacagacacggctcggacccgggcagttagtggggctgcccagtgtggacacgtggctcacccagggatcaaggcgctgctgggccgctccccttggaggccctgctcaggaggccctgaccgtggaaggggagaggaactcgaaagcacagctcctcccccagcccttgggaccatcttctcctgcagtcccctgggccccagtgagaggggcaggggcagggccggcagtaggtggggcctgtggtccccccactgccctgagggcattagctggtctaactgcccggaggcacccggccctgggccttaggcacctcaaggacttttctgctatttactgctcttattgttaaggataataattaaggatcatatgaataattaatgaagatgctgatgactatgaataataaataattatcctgaggaga

SEQ ID NO: 1001 - DNA, 3884 bp, Homo sapiens
  source 1..3884: mol_type = genomic DNA
  misc_feature 1..3884: note = cDNA of KCNH2 gene SNP c.838C>T (p.Arg280Cys)
atgccggtgcggaggggccacgtcgcgccgcagaacaccttcctggacaccatcatccgcaagtttgagggccagagccgtaagttcatcatcgccaacgctcgggtggagaactgcgccgtcatctactgcaacgacggcttctgcgagctgtgcggctactcgcgggccgaggtgatgcagcgaccctgcacctgcgacttcctgcacgggccgcgcacgcagcgccgcgctgccgcgcagatcgcgcaggcactgctgggcgccgaggagcgcaaagtggaaatcgccttctaccggaaagatgggagctgcttcctatgtctggtggatgtggtgcccgtgaagaacgaggatggggctgtcatcatgttcatcctcaatttcgaggtggtgatggagaaggacatggtggggtccccggctcatgacaccaaccaccggggcccccccaccagctggctggccccaggccgcgccaagaccttccgcctgaagctgcccgcgctgctggcgctgacggcccgggagtcgtcggtgcggtcgggcggcgcgggcggcgcgggcgccccgggggccgtggtggtggacgtggacctgacgcccgcggcacccagcagcgagtcgctggccctggacgaagtgacagccatggacaaccacgtggcagggctcgggcccgcggaggagcggcgtgcgctggtgggtcccggctctccgccccgcagcgcgcccggccagctcccatcgccccgggcgcacagcctcaaccccgacgcctcgggctccagctgcagcctggcccggacgcgctcccgagaaagctgcgccagcgtgtgccgcgcctcgtcggccgacgacatcgaggccatgcgcgccggggtgctgcccccgccaccgcgccacgccagcaccggggccatgcacccactgcgcagcggcttgctcaactccacctcggactccgacctcgtgcgctaccgcaccattagcaagattccccaaatcaccctcaactttgtggacctcaagggcgaccccttcttggcttcgcccaccagtgaccgtgagatcatagcacctaagataaaggagcgaacccacaatgtcactgagaaggtcacccaggtcctgtccctgggcgccgacgtgctgcctgagtacaagctgcaggcaccgcgcatccaccgctggaccatcctgcattacagccccttcaaggccgtgtgggactggctcatcctgctgctggtcatctacacggctgtcttcacaccctactcggctgccttcctgctgaaggagacggaagaaggcccgcctgctaccgagtgtggctacgcctgccagccgctggctgtggtggacctcatcgtggacatcatgttcattgtggacatcctcatcaacttccgcaccacctacgtcaatgccaacgaggaggtggtcagccaccccggccgcatcgccgtccactacttcaagggctggttcctcatcgacatggtggccgccatccccttcgacctgctcatcttcggctctggctctgaggagctgatcgggctgctgaagactgcgcggctgctgcggctggtgcgcgtggcgcggaagctggatcgctactcagagtacggcgcggccgtgctgttcttgctcatgtgcacctttgcgctcatcgcgcactggctagcctgcatctggtacgccatcggcaacatggagcagccacacatggactcacgcatcggctggctgcacaacctgggcgaccagataggcaaaccctacaacagcagcggcctgggcggcccctccatcaaggacaagtatgtgacggcgctctacttcaccttcagcagcctcaccagtgtgggcttcggcaacgtctctcccaacaccaactcagagaagatcttctccatctgcgtcatgctcattggctccctcatgtatgctagcatcttcggcaacgtgtcggccatcatccagcggctgtactcgggcacagcccgctaccacacacagatgctgcgggtgcgggagttcatccgcttccaccagatccccaatcccctgcgccagcgcctcgaggagtacttccagcacgcctggtcctacaccaacggcatcgacatgaacgcggtgctgaagggcttccctgagtgcctgcaggctgacatctgcctgcacctgaaccgctcactgctgcagcactgcaaacccttccgaggggccaccaagggctgccttcgggccctggccatgaagttcaagaccacacatgcaccgccaggggacacactggtgcatgctggggacctgctcaccgccctgtacttcatctcccggggctccatcgagatcctgcggggcgacgtcgtcgtggccatcctggggaagaatgacatctttggggagcctctgaacctgtatgcaaggcctggcaagtcgaacggggatgtgcgggccctcacctactgtgacctacacaagatccatcgggacgacctgctggaggtgctggacatgtaccctgagttctccgaccacttctggtccagcctggagatcaccttcaacctgcgagataccaacatgatcccgggctcccccggcagtacggagttagagggtggcttcagtcggcaacgcaagcgcaagttgtccttccgcaggcgcacggacaaggacacggagcagccaggggaggtgtcggccttggggccgggccgggcgggggcagggccgagtagccggggccggccgggggggccgtggggggagagcccgtccagtggcccctccagccctgagagcagtgaggatgagggcccaggccgcagctccagccccctccgcctggtgcccttctccagccccaggccccccggagagccgccgggtggggagcccctgatggaggactgcgagaagagcagcgacacttgcaaccccctgtcaggcgccttctcaggagtgtccaacattttcagcttctggggggacagtcggggccgccagtaccaggagctccctcgatgccccgcccccacccccagcctcctcaacatccccctctccagcccgggtcggcggccccggggcgacgtggagagcaggctggatgccctccagcgccagctcaacaggctggagacccggctgagtgcagacatggccactgtcctgcagctgctacagaggcagatgacgctggtcccgcccgcctacagtgctgtgaccaccccggggcctggccccacttccacatccccgctgttgcccgtcagccccctccccaccctcaccttggactcgctttctcaggtttcccagttcatggcgtgtgaggagctgcccccgggggccccagagcttccccaagaaggccccacacgacgcctctccctaccgggccagctgggggccctcacctcccagcccctgcacagacacggctcggacccgggcagttagtggggctgcccagtgtggacacgtggctcacccagggatcaaggcgctgctgggccgctccccttggaggccctgctcaggaggccctgaccgtggaaggggagaggaactcgaaagcacagctcctcccccagcccttgggaccatcttctcctgcagtcccctgggccccagtgagaggggcaggggcagggccggcagtaggtggggcctgtggtccccccactgccctgagggcattagctggtctaactgcccggaggcacccggccctgggccttaggcacctcaaggacttttctgctatttactgctcttattgttaaggataataattaaggatcatatgaataattaatgaagatgctgatgactatgaataataaataattatcctgaggaga

SEQ ID NO: 1002 - DNA, 3884 bp, Homo sapiens
  source 1..3884: mol_type = genomic DNA
  misc_feature 1..3884: note = cDNA of KCNH2 gene SNP c.853G>A (p.Ala285Thr)
atgccggtgcggaggggccacgtcgcgccgcagaacaccttcctggacaccatcatccgcaagtttgagggccagagccgtaagttcatcatcgccaacgctcgggtggagaactgcgccgtcatctactgcaacgacggcttctgcgagctgtgcggctactcgcgggccgaggtgatgcagcgaccctgcacctgcgacttcctgcacgggccgcgcacgcagcgccgcgctgccgcgcagatcgcgcaggcactgctgggcgccgaggagcgcaaagtggaaatcgccttctaccggaaagatgggagctgcttcctatgtctggtggatgtggtgcccgtgaagaacgaggatggggctgtcatcatgttcatcctcaatttcgaggtggtgatggagaaggacatggtggggtccccggctcatgacaccaaccaccggggcccccccaccagctggctggccccaggccgcgccaagaccttccgcctgaagctgcccgcgctgctggcgctgacggcccgggagtcgtcggtgcggtcgggcggcgcgggcggcgcgggcgccccgggggccgtggtggtggacgtggacctgacgcccgcggcacccagcagcgagtcgctggccctggacgaagtgacagccatggacaaccacgtggcagggctcgggcccgcggaggagcggcgtgcgctggtgggtcccggctctccgccccgcagcgcgcccggccagctcccatcgccccgggcgcacagcctcaaccccgacgcctcgggctccagctgcagcctggcccggacgcgctcccgagaaagctgcgccagcgtgcgccgcgcctcgtcgaccgacgacatcgaggccatgcgcgccggggtgctgcccccgccaccgcgccacgccagcaccggggccatgcacccactgcgcagcggcttgctcaactccacctcggactccgacctcgtgcgctaccgcaccattagcaagattccccaaatcaccctcaactttgtggacctcaagggcgaccccttcttggcttcgcccaccagtgaccgtgagatcatagcacctaagataaaggagcgaacccacaatgtcactgagaaggtcacccaggtcctgtccctgggcgccgacgtgctgcctgagtacaagctgcaggcaccgcgcatccaccgctggaccatcctgcattacagccccttcaaggccgtgtgggactggctcatcctgctgctggtcatctacacggctgtcttcacaccctactcggctgccttcctgctgaaggagacggaagaaggcccgcctgctaccgagtgtggctacgcctgccagccgctggctgtggtggacctcatcgtggacatcatgttcattgtggacatcctcatcaacttccgcaccacctacgtcaatgccaacgaggaggtggtcagccaccccggccgcatcgccgtccactacttcaagggctggttcctcatcgacatggtggccgccatccccttcgacctgctcatcttcggctctggctctgaggagctgatcgggctgctgaagactgcgcggctgctgcggctggtgcgcgtggcgcggaagctggatcgctactcagagtacggcgcggccgtgctgttcttgctcatgtgcacctttgcgctcatcgcgcactggctagcctgcatctggtacgccatcggcaacatggagcagccacacatggactcacgcatcggctggctgcacaacctgggcgaccagataggcaaaccctacaacagcagcggcctgggcggcccctccatcaaggacaagtatgtgacggcgctctacttcaccttcagcagcctcaccagtgtgggcttcggcaacgtctctcccaacaccaactcagagaagatcttctccatctgcgtcatgctcattggctccctcatgtatgctagcatcttcggcaacgtgtcggccatcatccagcggctgtactcgggcacagcccgctaccacacacagatgctgcgggtgcgggagttcatccgcttccaccagatccccaatcccctgcgccagcgcctcgaggagtacttccagcacgcctggtcctacaccaacggcatcgacatgaacgcggtgctgaagggcttccctgagtgcctgcaggctgacatctgcctgcacctgaaccgctcactgctgcagcactgcaaacccttccgaggggccaccaagggctgccttcgggccctggccatgaagttcaagaccacacatgcaccgccaggggacacactggtgcatgctggggacctgctcaccgccctgtacttcatctcccggggctccatcgagatcctgcggggcgacgtcgtcgtggccatcctggggaagaatgacatctttggggagcctctgaacctgtatgcaaggcctggcaagtcgaacggggatgtgcgggccctcacctactgtgacctacacaagatccatcgggacgacctgctggaggtgctggacatgtaccctgagttctccgaccacttctggtccagcctggagatcaccttcaacctgcgagataccaacatgatcccgggctcccccggcagtacggagttagagggtggcttcagtcggcaacgcaagcgcaagttgtccttccgcaggcgcacggacaaggacacggagcagccaggggaggtgtcggccttggggccgggccgggcgggggcagggccgagtagccggggccggccgggggggccgtggggggagagcccgtccagtggcccctccagccctgagagcagtgaggatgagggcccaggccgcagctccagccccctccgcctggtgcccttctccagccccaggccccccggagagccgccgggtggggagcccctgatggaggactgcgagaagagcagcgacacttgcaaccccctgtcaggcgccttctcaggagtgtccaacattttcagcttctggggggacagtcggggccgccagtaccaggagctccctcgatgccccgcccccacccccagcctcctcaacatccccctctccagcccgggtcggcggccccggggcgacgtggagagcaggctggatgccctccagcgccagctcaacaggctggagacccggctgagtgcagacatggccactgtcctgcagctgctacagaggcagatgacgctggtcccgcccgcctacagtgctgtgaccaccccggggcctggccccacttccacatccccgctgttgcccgtcagccccctccccaccctcaccttggactcgctttctcaggtttcccagttcatggcgtgtgaggagctgcccccgggggccccagagcttccccaagaaggccccacacgacgcctctccctaccgggccagctgggggccctcacctcccagcccctgcacagacacggctcggacccgggcagttagtggggctgcccagtgtggacacgtggctcacccagggatcaaggcgctgctgggccgctccccttggaggccctgctcaggaggccctgaccgtggaaggggagaggaactcgaaagcacagctcctcccccagcccttgggaccatcttctcctgcagtcccctgggccccagtgagaggggcaggggcagggccggcagtaggtggggcctgtggtccccccactgccctgagggcattagctggtctaactgcccggaggcacccggccctgggccttaggcacctcaaggacttttctgctatttactgctcttattgttaaggataataattaaggatcatatgaataattaatgaagatgctgatgactatgaataataaataattatcctgaggaga

SEQ ID NO: 1003 - DNA, 3884 bp, Homo sapiens
  source 1..3884: mol_type = genomic DNA
  misc_feature 1..3884: note = cDNA of KCNH2 gene SNP c.853G>T (p.Ala285Ser)
atgccggtgcggaggggccacgtcgcgccgcagaacaccttcctggacaccatcatccgcaagtttgagggccagagccgtaagttcatcatcgccaacgctcgggtggagaactgcgccgtcatctactgcaacgacggcttctgcgagctgtgcggctactcgcgggccgaggtgatgcagcgaccctgcacctgcgacttcctgcacgggccgcgcacgcagcgccgcgctgccgcgcagatcgcgcaggcactgctgggcgccgaggagcgcaaagtggaaatcgccttctaccggaaagatgggagctgcttcctatgtctggtggatgtggtgcccgtgaagaacgaggatggggctgtcatcatgttcatcctcaatttcgaggtggtgatggagaaggacatggtggggtccccggctcatgacaccaaccaccggggcccccccaccagctggctggccccaggccgcgccaagaccttccgcctgaagctgcccgcgctgctggcgctgacggcccgggagtcgtcggtgcggtcgggcggcgcgggcggcgcgggcgccccgggggccgtggtggtggacgtggacctgacgcccgcggcacccagcagcgagtcgctggccctggacgaagtgacagccatggacaaccacgtggcagggctcgggcccgcggaggagcggcgtgcgctggtgggtcccggctctccgccccgcagcgcgcccggccagctcccatcgccccgggcgcacagcctcaaccccgacgcctcgggctccagctgcagcctggcccggacgcgctcccgagaaagctgcgccagcgtgcgccgcgcctcgtcgtccgacgacatcgaggccatgcgcgccggggtgctgcccccgccaccgcgccacgccagcaccggggccatgcacccactgcgcagcggcttgctcaactccacctcggactccgacctcgtgcgctaccgcaccattagcaagattccccaaatcaccctcaactttgtggacctcaagggcgaccccttcttggcttcgcccaccagtgaccgtgagatcatagcacctaagataaaggagcgaacccacaatgtcactgagaaggtcacccaggtcctgtccctgggcgccgacgtgctgcctgagtacaagctgcaggcaccgcgcatccaccgctggaccatcctgcattacagccccttcaaggccgtgtgggactggctcatcctgctgctggtcatctacacggctgtcttcacaccctactcggctgccttcctgctgaaggagacggaagaaggcccgcctgctaccgagtgtggctacgcctgccagccgctggctgtggtggacctcatcgtggacatcatgttcattgtggacatcctcatcaacttccgcaccacctacgtcaatgccaacgaggaggtggtcagccaccccggccgcatcgccgtccactacttcaagggctggttcctcatcgacatggtggccgccatccccttcgacctgctcatcttcggctctggctctgaggagctgatcgggctgctgaagactgcgcggctgctgcggctggtgcgcgtggcgcggaagctggatcgctactcagagtacggcgcggccgtgctgttcttgctcatgtgcacctttgcgctcatcgcgcactggctagcctgcatctggtacgccatcggcaacatggagcagccacacatggactcacgcatcggctggctgcacaacctgggcgaccagataggcaaaccctacaacagcagcggcctgggcggcccctccatcaaggacaagtatgtgacggcgctctacttcaccttcagcagcctcaccagtgtgggcttcggcaacgtctctcccaacaccaactcagagaagatcttctccatctgcgtcatgctcattggctccctcatgtatgctagcatcttcggcaacgtgtcggccatcatccagcggctgtactcgggcacagcccgctaccacacacagatgctgcgggtgcgggagttcatccgcttccaccagatccccaatcccctgcgccagcgcctcgaggagtacttccagcacgcctggtcctacaccaacggcatcgacatgaacgcggtgctgaagggcttccctgagtgcctgcaggctgacatctgcctgcacctgaaccgctcactgctgcagcactgcaaacccttccgaggggccaccaagggctgccttcgggccctggccatgaagttcaagaccacacatgcaccgccaggggacacactggtgcatgctggggacctgctcaccgccctgtacttcatctcccggggctccatcgagatcctgcggggcgacgtcgtcgtggccatcctggggaagaatgacatctttggggagcctctgaacctgtatgcaaggcctggcaagtcgaacggggatgtgcgggccctcacctactgtgacctacacaagatccatcgggacgacctgctggaggtgctggacatgtaccctgagttctccgaccacttctggtccagcctggagatcaccttcaacctgcgagataccaacatgatcccgggctcccccggcagtacggagttagagggtggcttcagtcggcaacgcaagcgcaagttgtccttccgcaggcgcacggacaaggacacggagcagccaggggaggtgtcggccttggggccgggccgggcgggggcagggccgagtagccggggccggccgggggggccgtggggggagagcccgtccagtggcccctccagccctgagagcagtgaggatgagggcccaggccgcagctccagccccctccgcctggtgcccttctccagccccaggccccccggagagccgccgggtggggagcccctgatggaggactgcgagaagagcagcgacacttgcaaccccctgtcaggcgccttctcaggagtgtccaacattttcagcttctggggggacagtcggggccgccagtaccaggagctccctcgatgccccgcccccacccccagcctcctcaacatccccctctccagcccgggtcggcggccccggggcgacgtggagagcaggctggatgccctccagcgccagctcaacaggctggagacccggctgagtgcagacatggccactgtcctgcagctgctacagaggcagatgacgctggtcccgcccgcctacagtgctgtgaccaccccggggcctggccccacttccacatccccgctgttgcccgtcagccccctccccaccctcaccttggactcgctttctcaggtttcccagttcatggcgtgtgaggagctgcccccgggggccccagagcttccccaagaaggccccacacgacgcctctccctaccgggccagctgggggccctcacctcccagcccctgcacagacacggctcggacccgggcagttagtggggctgcccagtgtggacacgtggctcacccagggatcaaggcgctgctgggccgctccccttggaggccctgctcaggaggccctgaccgtggaaggggagaggaactcgaaagcacagctcctcccccagcccttgggaccatcttctcctgcagtcccctgggccccagtgagaggggcaggggcagggccggcagtaggtggggcctgtggtccccccactgccctgagggcattagctggtctaactgcccggaggcacccggccctgggccttaggcacctcaaggacttttctgctatttactgctcttattgttaaggataataattaaggatcatatgaataattaatgaagatgctgatgactatgaataataaataattatcctgaggaga

SEQ ID NO: 1004 - DNA, 3884 bp, Homo sapiens
  source 1..3884: mol_type = genomic DNA
  misc_feature 1..3884: note = cDNA of KCNH2 gene SNP c.863T>C (p.Ile288Thr)
atgccggtgcggaggggccacgtcgcgccgcagaacaccttcctggacaccatcatccgcaagtttgagggccagagccgtaagttcatcatcgccaacgctcgggtggagaactgcgccgtcatctactgcaacgacggcttctgcgagctgtgcggctactcgcgggccgaggtgatgcagcgaccctgcacctgcgacttcctgcacgggccgcgcacgcagcgccgcgctgccgcgcagatcgcgcaggcactgctgggcgccgaggagcgcaaagtggaaatcgccttctaccggaaagatgggagctgcttcctatgtctggtggatgtggtgcccgtgaagaacgaggatggggctgtcatcatgttcatcctcaatttcgaggtggtgatggagaaggacatggtggggtccccggctcatgacaccaaccaccggggcccccccaccagctggctggccccaggccgcgccaagaccttccgcctgaagctgcccgcgctgctggcgctgacggcccgggagtcgtcggtgcggtcgggcggcgcgggcggcgcgggcgccccgggggccgtggtggtggacgtggacctgacgcccgcggcacccagcagcgagtcgctggccctggacgaagtgacagccatggacaaccacgtggcagggctcgggcccgcggaggagcggcgtgcgctggtgggtcccggctctccgccccgcagcgcgcccggccagctcccatcgccccgggcgcacagcctcaaccccgacgcctcgggctccagctgcagcctggcccggacgcgctcccgagaaagctgcgccagcgtgcgccgcgcctcgtcggccgacgacaccgaggccatgcgcgccggggtgctgcccccgccaccgcgccacgccagcaccggggccatgcacccactgcgcagcggcttgctcaactccacctcggactccgacctcgtgcgctaccgcaccattagcaagattccccaaatcaccctcaactttgtggacctcaagggcgaccccttcttggcttcgcccaccagtgaccgtgagatcatagcacctaagataaaggagcgaacccacaatgtcactgagaaggtcacccaggtcctgtccctgggcgccgacgtgctgcctgagtacaagctgcaggcaccgcgcatccaccgctggaccatcctgcattacagccccttcaaggccgtgtgggactggctcatcctgctgctggtcatctacacggctgtcttcacaccctactcggctgccttcctgctgaaggagacggaagaaggcccgcctgctaccgagtgtggctacgcctgccagccgctggctgtggtggacctcatcgtggacatcatgttcattgtggacatcctcatcaacttccgcaccacctacgtcaatgccaacgaggaggtggtcagccaccccggccgcatcgccgtccactacttcaagggctggttcctcatcgacatggtggccgccatccccttcgacctgctcatcttcggctctggctctgaggagctgatcgggctgctgaagactgcgcggctgctgcggctggtgcgcgtggcgcggaagctggatcgctactcagagtacggcgcggccgtgctgttcttgctcatgtgcacctttgcgctcatcgcgcactggctagcctgcatctggtacgccatcggcaacatggagcagccacacatggactcacgcatcggctggctgcacaacctgggcgaccagataggcaaaccctacaacagcagcggcctgggcggcccctccatcaaggacaagtatgtgacggcgctctacttcaccttcagcagcctcaccagtgtgggcttcggcaacgtctctcccaacaccaactcagagaagatcttctccatctgcgtcatgctcattggctccctcatgtatgctagcatcttcggcaacgtgtcggccatcatccagcggctgtactcgggcacagcccgctaccacacacagatgctgcgggtgcgggagttcatccgcttccaccagatccccaatcccctgcgccagcgcctcgaggagtacttccagcacgcctggtcctacaccaacggcatcgacatgaacgcggtgctgaagggcttccctgagtgcctgcaggctgacatctgcctgcacctgaaccgctcactgctgcagcactgcaaacccttccgaggggccaccaagggctgccttcgggccctggccatgaagttcaagaccacacatgcaccgccaggggacacactggtgcatgctggggacctgctcaccgccctgtacttcatctcccggggctccatcgagatcctgcggggcgacgtcgtcgtggccatcctggggaagaatgacatctttggggagcctctgaacctgtatgcaaggcctggcaagtcgaacggggatgtgcgggccctcacctactgtgacctacacaagatccatcgggacgacctgctggaggtgctggacatgtaccctgagttctccgaccacttctggtccagcctggagatcaccttcaacctgcgagataccaacatgatcccgggctcccccggcagtacggagttagagggtggcttcagtcggcaacgcaagcgcaagttgtccttccgcaggcgcacggacaaggacacggagcagccaggggaggtgtcggccttggggccgggccgggcgggggcagggccgagtagccggggccggccgggggggccgtggggggagagcccgtccagtggcccctccagccctgagagcagtgaggatgagggcccaggccgcagctccagccccctccgcctggtgcccttctccagccccaggccccccggagagccgccgggtggggagcccctgatggaggactgcgagaagagcagcgacacttgcaaccccctgtcaggcgccttctcaggagtgtccaacattttcagcttctggggggacagtcggggccgccagtaccaggagctccctcgatgccccgcccccacccccagcctcctcaacatccccctctccagcccgggtcggcggccccggggcgacgtggagagcaggctggatgccctccagcgccagctcaacaggctggagacccggctgagtgcagacatggccactgtcctgcagctgctacagaggcagatgacgctggtcccgcccgcctacagtgctgtgaccaccccggggcctggccccacttccacatccccgctgttgcccgtcagccccctccccaccctcaccttggactcgctttctcaggtttcccagttcatggcgtgtgaggagctgcccccgggggccccagagcttccccaagaaggccccacacgacgcctctccctaccgggccagctgggggccctcacctcccagcccctgcacagacacggctcggacccgggcagttagtggggctgcccagtgtggacacgtggctcacccagggatcaaggcgctgctgggccgctccccttggaggccctgctcaggaggccctgaccgtggaaggggagaggaactcgaaagcacagctcctcccccagcccttgggaccatcttctcctgcagtcccctgggccccagtgagaggggcaggggcagggccggcagtaggtggggcctgtggtccccccactgccctgagggcattagctggtctaactgcccggaggcacccggccctgggccttaggcacctcaaggacttttctgctatttactgctcttattgttaaggataataattaaggatcatatgaataattaatgaagatgctgatgactatgaataataaataattatcctgaggaga

SEQ ID NO: 1005 - DNA, 3884 bp, Homo sapiens
  source 1..3884: mol_type = genomic DNA
  misc_feature 1..3884: note = cDNA of KCNH2 gene SNP c.865G>A (p.Glu289Lys)
atgccggtgcggaggggccacgtcgcgccgcagaacaccttcctggacaccatcatccgcaagtttgagggccagagccgtaagttcatcatcgccaacgctcgggtggagaactgcgccgtcatctactgcaacgacggcttctgcgagctgtgcggctactcgcgggccgaggtgatgcagcgaccctgcacctgcgacttcctgcacgggccgcgcacgcagcgccgcgctgccgcgcagatcgcgcaggcactgctgggcgccgaggagcgcaaagtggaaatcgccttctaccggaaagatgggagctgcttcctatgtctggtggatgtggtgcccgtgaagaacgaggatggggctgtcatcatgttcatcctcaatttcgaggtggtgatggagaaggacatggtggggtccccggctcatgacaccaaccaccggggcccccccaccagctggctggccccaggccgcgccaagaccttccgcctgaagctgcccgcgctgctggcgctgacggcccgggagtcgtcggtgcggtcgggcggcgcgggcggcgcgggcgccccgggggccgtggtggtggacgtggacctgacgcccgcggcacccagcagcgagtcgctggccctggacgaagtgacagccatggacaaccacgtggcagggctcgggcccgcggaggagcggcgtgcgctggtgggtcccggctctccgccccgcagcgcgcccggccagctcccatcgccccgggcgcacagcctcaaccccgacgcctcgggctccagctgcagcctggcccggacgcgctcccgagaaagctgcgccagcgtgcgccgcgcctcgtcggccgacgacatcaaggccatgcgcgccggggtgctgcccccgccaccgcgccacgccagcaccggggccatgcacccactgcgcagcggcttgctcaactccacctcggactccgacctcgtgcgctaccgcaccattagcaagattccccaaatcaccctcaactttgtggacctcaagggcgaccccttcttggcttcgcccaccagtgaccgtgagatcatagcacctaagataaaggagcgaacccacaatgtcactgagaaggtcacccaggtcctgtccctgggcgccgacgtgctgcctgagtacaagctgcaggcaccgcgcatccaccgctggaccatcctgcattacagccccttcaaggccgtgtgggactggctcatcctgctgctggtcatctacacggctgtcttcacaccctactcggctgccttcctgctgaaggagacggaagaaggcccgcctgctaccgagtgtggctacgcctgccagccgctggctgtggtggacctcatcgtggacatcatgttcattgtggacatcctcatcaacttccgcaccacctacgtcaatgccaacgaggaggtggtcagccaccccggccgcatcgccgtccactacttcaagggctggttcctcatcgacatggtggccgccatccccttcgacctgctcatcttcggctctggctctgaggagctgatcgggctgctgaagactgcgcggctgctgcggctggtgcgcgtggcgcggaagctggatcgctactcagagtacggcgcggccgtgctgttcttgctcatgtgcacctttgcgctcatcgcgcactggctagcctgcatctggtacgccatcggcaacatggagcagccacacatggactcacgcatcggctggctgcacaacctgggcgaccagataggcaaaccctacaacagcagcggcctgggcggcccctccatcaaggacaagtatgtgacggcgctctacttcaccttcagcagcctcaccagtgtgggcttcggcaacgtctctcccaacaccaactcagagaagatcttctccatctgcgtcatgctcattggctccctcatgtatgctagcatcttcggcaacgtgtcggccatcatccagcggctgtactcgggcacagcccgctaccacacacagatgctgcgggtgcgggagttcatccgcttccaccagatccccaatcccctgcgccagcgcctcgaggagtacttccagcacgcctggtcctacaccaacggcatcgacatgaacgcggtgctgaagggcttccctgagtgcctgcaggctgacatctgcctgcacctgaaccgctcactgctgcagcactgcaaacccttccgaggggccaccaagggctgccttcgggccctggccatgaagttcaagaccacacatgcaccgccaggggacacactggtgcatgctggggacctgctcaccgccctgtacttcatctcccggggctccatcgagatcctgcggggcgacgtcgtcgtggccatcctggggaagaatgacatctttggggagcctctgaacctgtatgcaaggcctggcaagtcgaacggggatgtgcgggccctcacctactgtgacctacacaagatccatcgggacgacctgctggaggtgctggacatgtaccctgagttctccgaccacttctggtccagcctggagatcaccttcaacctgcgagataccaacatgatcccgggctcccccggcagtacggagttagagggtggcttcagtcggcaacgcaagcgcaagttgtccttccgcaggcgcacggacaaggacacggagcagccaggggaggtgtcggccttggggccgggccgggcgggggcagggccgagtagccggggccggccgggggggccgtggggggagagcccgtccagtggcccctccagccctgagagcagtgaggatgagggcccaggccgcagctccagccccctccgcctggtgcccttctccagccccaggccccccggagagccgccgggtggggagcccctgatggaggactgcgagaagagcagcgacacttgcaaccccctgtcaggcgccttctcaggagtgtccaacattttcagcttctggggggacagtcggggccgccagtaccaggagctccctcgatgccccgcccccacccccagcctcctcaacatccccctctccagcccgggtcggcggccccggggcgacgtggagagcaggctggatgccctccagcgccagctcaacaggctggagacccggctgagtgcagacatggccactgtcctgcagctgctacagaggcagatgacgctggtcccgcccgcctacagtgctgtgaccaccccggggcctggccccacttccacatccccgctgttgcccgtcagccccctccccaccctcaccttggactcgctttctcaggtttcccagttcatggcgtgtgaggagctgcccccgggggccccagagcttccccaagaaggccccacacgacgcctctccctaccgggccagctgggggccctcacctcccagcccctgcacagacacggctcggacccgggcagttagtggggctgcccagtgtggacacgtggctcacccagggatcaaggcgctgctgggccgctccccttggaggccctgctcaggaggccctgaccgtggaaggggagaggaactcgaaagcacagctcctcccccagcccttgggaccatcttctcctgcagtcccctgggccccagtgagaggggcaggggcagggccggcagtaggtggggcctgtggtccccccactgccctgagggcattagctggtctaactgcccggaggcacccggccctgggccttaggcacctcaaggacttttctgctatttactgctcttattgttaaggataataattaaggatcatatgaataattaatgaagatgctgatgactatgaataataaataattatcctgaggaga

SEQ ID NO: 1006 - DNA, 3884 bp, Homo sapiens
  source 1..3884: mol_type = genomic DNA
  misc_feature 1..3884: note = cDNA of KCNH2 gene SNP c.868G>C (p.Ala290Pro)
atgccggtgcggaggggccacgtcgcgccgcagaacaccttcctggacaccatcatccgcaagtttgagggccagagccgtaagttcatcatcgccaacgctcgggtggagaactgcgccgtcatctactgcaacgacggcttctgcgagctgtgcggctactcgcgggccgaggtgatgcagcgaccctgcacctgcgacttcctgcacgggccgcgcacgcagcgccgcgctgccgcgcagatcgcgcaggcactgctgggcgccgaggagcgcaaagtggaaatcgccttctaccggaaagatgggagctgcttcctatgtctggtggatgtggtgcccgtgaagaacgaggatggggctgtcatcatgttcatcctcaatttcgaggtggtgatggagaaggacatggtggggtccccggctcatgacaccaaccaccggggcccccccaccagctggctggccccaggccgcgccaagaccttccgcctgaagctgcccgcgctgctggcgctgacggcccgggagtcgtcggtgcggtcgggcggcgcgggcggcgcgggcgccccgggggccgtggtggtggacgtggacctgacgcccgcggcacccagcagcgagtcgctggccctggacgaagtgacagccatggacaaccacgtggcagggctcgggcccgcggaggagcggcgtgcgctggtgggtcccggctctccgccccgcagcgcgcccggccagctcccatcgccccgggcgcacagcctcaaccccgacgcctcgggctccagctgcagcctggcccggacgcgctcccgagaaagctgcgccagcgtgcgccgcgcctcgtcggccgacgacatcgagcccatgcgcgccggggtgctgcccccgccaccgcgccacgccagcaccggggccatgcacccactgcgcagcggcttgctcaactccacctcggactccgacctcgtgcgctaccgcaccattagcaagattccccaaatcaccctcaactttgtggacctcaagggcgaccccttcttggcttcgcccaccagtgaccgtgagatcatagcacctaagataaaggagcgaacccacaatgtcactgagaaggtcacccaggtcctgtccctgggcgccgacgtgctgcctgagtacaagctgcaggcaccgcgcatccaccgctggaccatcctgcattacagccccttcaaggccgtgtgggactggctcatcctgctgctggtcatctacacggctgtcttcacaccctactcggctgccttcctgctgaaggagacggaagaaggcccgcctgctaccgagtgtggctacgcctgccagccgctggctgtggtggacctcatcgtggacatcatgttcattgtggacatcctcatcaacttccgcaccacctacgtcaatgccaacgaggaggtggtcagccaccccggccgcatcgccgtccactacttcaagggctggttcctcatcgacatggtggccgccatccccttcgacctgctcatcttcggctctggctctgaggagctgatcgggctgctgaagactgcgcggctgctgcggctggtgcgcgtggcgcggaagctggatcgctactcagagtacggcgcggccgtgctgttcttgctcatgtgcacctttgcgctcatcgcgcactggctagcctgcatctggtacgccatcggcaacatggagcagccacacatggactcacgcatcggctggctgcacaacctgggcgaccagataggcaaaccctacaacagcagcggcctgggcggcccctccatcaaggacaagtatgtgacggcgctctacttcaccttcagcagcctcaccagtgtgggcttcggcaacgtctctcccaacaccaactcagagaagatcttctccatctgcgtcatgctcattggctccctcatgtatgctagcatcttcggcaacgtgtcggccatcatccagcggctgtactcgggcacagcccgctaccacacacagatgctgcgggtgcgggagttcatccgcttccaccagatccccaatcccctgcgccagcgcctcgaggagtacttccagcacgcctggtcctacaccaacggcatcgacatgaacgcggtgctgaagggcttccctgagtgcctgcaggctgacatctgcctgcacctgaaccgctcactgctgcagcactgcaaacccttccgaggggccaccaagggctgccttcgggccctggccatgaagttcaagaccacacatgcaccgccaggggacacactggtgcatgctggggacctgctcaccgccctgtacttcatctcccggggctccatcgagatcctgcggggcgacgtcgtcgtggccatcctggggaagaatgacatctttggggagcctctgaacctgtatgcaaggcctggcaagtcgaacggggatgtgcgggccctcacctactgtgacctacacaagatccatcgggacgacctgctggaggtgctggacatgtaccctgagttctccgaccacttctggtccagcctggagatcaccttcaacctgcgagataccaacatgatcccgggctcccccggcagtacggagttagagggtggcttcagtcggcaacgcaagcgcaagttgtccttccgcaggcgcacggacaaggacacggagcagccaggggaggtgtcggccttggggccgggccgggcgggggcagggccgagtagccggggccggccgggggggccgtggggggagagcccgtccagtggcccctccagccctgagagcagtgaggatgagggcccaggccgcagctccagccccctccgcctggtgcccttctccagccccaggccccccggagagccgccgggtggggagcccctgatggaggactgcgagaagagcagcgacacttgcaaccccctgtcaggcgccttctcaggagtgtccaacattttcagcttctggggggacagtcggggccgccagtaccaggagctccctcgatgccccgcccccacccccagcctcctcaacatccccctctccagcccgggtcggcggccccggggcgacgtggagagcaggctggatgccctccagcgccagctcaacaggctggagacccggctgagtgcagacatggccactgtcctgcagctgctacagaggcagatgacgctggtcccgcccgcctacagtgctgtgaccaccccggggcctggccccacttccacatccccgctgttgcccgtcagccccctccccaccctcaccttggactcgctttctcaggtttcccagttcatggcgtgtgaggagctgcccccgggggccccagagcttccccaagaaggccccacacgacgcctctccctaccgggccagctgggggccctcacctcccagcccctgcacagacacggctcggacccgggcagttagtggggctgcccagtgtggacacgtggctcacccagggatcaaggcgctgctgggccgctccccttggaggccctgctcaggaggccctgaccgtggaaggggagaggaactcgaaagcacagctcctcccccagcccttgggaccatcttctcctgcagtcccctgggccccagtgagaggggcaggggcagggccggcagtaggtggggcctgtggtccccccactgccctgagggcattagctggtctaactgcccggaggcacccggccctgggccttaggcacctcaaggacttttctgctatttactgctcttattgttaaggataataattaaggatcatatgaataattaatgaagatgctgatgactatgaataataaataattatcctgaggaga

SEQ ID NO: 1007 - DNA, 3884 bp, Homo sapiens
  source 1..3884: mol_type = genomic DNA
  misc_feature 1..3884: note = cDNA of KCNH2 gene SNP c.868G>T (p.Ala290Ser)
atgccggtgcggaggggccacgtcgcgccgcagaacaccttcctggacaccatcatccgcaagtttgagggccagagccgtaagttcatcatcgccaacgctcgggtggagaactgcgccgtcatctactgcaacgacggcttctgcgagctgtgcggctactcgcgggccgaggtgatgcagcgaccctgcacctgcgacttcctgcacgggccgcgcacgcagcgccgcgctgccgcgcagatcgcgcaggcactgctgggcgccgaggagcgcaaagtggaaatcgccttctaccggaaagatgggagctgcttcctatgtctggtggatgtggtgcccgtgaagaacgaggatggggctgtcatcatgttcatcctcaatttcgaggtggtgatggagaaggacatggtggggtccccggctcatgacaccaaccaccggggcccccccaccagctggctggccccaggccgcgccaagaccttccgcctgaagctgcccgcgctgctggcgctgacggcccgggagtcgtcggtgcggtcgggcggcgcgggcggcgcgggcgccccgggggccgtggtggtggacgtggacctgacgcccgcggcacccagcagcgagtcgctggccctggacgaagtgacagccatggacaaccacgtggcagggctcgggcccgcggaggagcggcgtgcgctggtgggtcccggctctccgccccgcagcgcgcccggccagctcccatcgccccgggcgcacagcctcaaccccgacgcctcgggctccagctgcagcctggcccggacgcgctcccgagaaagctgcgccagcgtgcgccgcgcctcgtcggccgacgacatcgagtccatgcgcgccggggtgctgcccccgccaccgcgccacgccagcaccggggccatgcacccactgcgcagcggcttgctcaactccacctcggactccgacctcgtgcgctaccgcaccattagcaagattccccaaatcaccctcaactttgtggacctcaagggcgaccccttcttggcttcgcccaccagtgaccgtgagatcatagcacctaagataaaggagcgaacccacaatgtcactgagaaggtcacccaggtcctgtccctgggcgccgacgtgctgcctgagtacaagctgcaggcaccgcgcatccaccgctggaccatcctgcattacagccccttcaaggccgtgtgggactggctcatcctgctgctggtcatctacacggctgtcttcacaccctactcggctgccttcctgctgaaggagacggaagaaggcccgcctgctaccgagtgtggctacgcctgccagccgctggctgtggtggacctcatcgtggacatcatgttcattgtggacatcctcatcaacttccgcaccacctacgtcaatgccaacgaggaggtggtcagccaccccggccgcatcgccgtccactacttcaagggctggttcctcatcgacatggtggccgccatccccttcgacctgctcatcttcggctctggctctgaggagctgatcgggctgctgaagactgcgcggctgctgcggctggtgcgcgtggcgcggaagctggatcgctactcagagtacggcgcggccgtgctgttcttgctcatgtgcacctttgcgctcatcgcgcactggctagcctgcatctggtacgccatcggcaacatggagcagccacacatggactcacgcatcggctggctgcacaacctgggcgaccagataggcaaaccctacaacagcagcggcctgggcggcccctccatcaaggacaagtatgtgacggcgctctacttcaccttcagcagcctcaccagtgtgggcttcggcaacgtctctcccaacaccaactcagagaagatcttctccatctgcgtcatgctcattggctccctcatgtatgctagcatcttcggcaacgtgtcggccatcatccagcggctgtactcgggcacagcccgctaccacacacagatgctgcgggtgcgggagttcatccgcttccaccagatccccaatcccctgcgccagcgcctcgaggagtacttccagcacgcctggtcctacaccaacggcatcgacatgaacgcggtgctgaagggcttccctgagtgcctgcaggctgacatctgcctgcacctgaaccgctcactgctgcagcactgcaaacccttccgaggggccaccaagggctgccttcgggccctggccatgaagttcaagaccacacatgcaccgccaggggacacactggtgcatgctggggacctgctcaccgccctgtacttcatctcccggggctccatcgagatcctgcggggcgacgtcgtcgtggccatcctggggaagaatgacatctttggggagcctctgaacctgtatgcaaggcctggcaagtcgaacggggatgtgcgggccctcacctactgtgacctacacaagatccatcgggacgacctgctggaggtgctggacatgtaccctgagttctccgaccacttctggtccagcctggagatcaccttcaacctgcgagataccaacatgatcccgggctcccccggcagtacggagttagagggtggcttcagtcggcaacgcaagcgcaagttgtccttccgcaggcgcacggacaaggacacggagcagccaggggaggtgtcggccttggggccgggccgggcgggggcagggccgagtagccggggccggccgggggggccgtggggggagagcccgtccagtggcccctccagccctgagagcagtgaggatgagggcccaggccgcagctccagccccctccgcctggtgcccttctccagccccaggccccccggagagccgccgggtggggagcccctgatggaggactgcgagaagagcagcgacacttgcaaccccctgtcaggcgccttctcaggagtgtccaacattttcagcttctggggggacagtcggggccgccagtaccaggagctccctcgatgccccgcccccacccccagcctcctcaacatccccctctccagcccgggtcggcggccccggggcgacgtggagagcaggctggatgccctccagcgccagctcaacaggctggagacccggctgagtgcagacatggccactgtcctgcagctgctacagaggcagatgacgctggtcccgcccgcctacagtgctgtgaccaccccggggcctggccccacttccacatccccgctgttgcccgtcagccccctccccaccctcaccttggactcgctttctcaggtttcccagttcatggcgtgtgaggagctgcccccgggggccccagagcttccccaagaaggccccacacgacgcctctccctaccgggccagctgggggccctcacctcccagcccctgcacagacacggctcggacccgggcagttagtggggctgcccagtgtggacacgtggctcacccagggatcaaggcgctgctgggccgctccccttggaggccctgctcaggaggccctgaccgtggaaggggagaggaactcgaaagcacagctcctcccccagcccttgggaccatcttctcctgcagtcccctgggccccagtgagaggggcaggggcagggccggcagtaggtggggcctgtggtccccccactgccctgagggcattagctggtctaactgcccggaggcacccggccctgggccttaggcacctcaaggacttttctgctatttactgctcttattgttaaggataataattaaggatcatatgaataattaatgaagatgctgatgactatgaataataaataattatcctgaggaga

SEQ ID NO: 1008 - DNA, 3884 bp, Homo sapiens
  source 1..3884: mol_type = genomic DNA
  misc_feature 1..3884: note = cDNA of KCNH2 gene SNP c.86T>C (p.Phe29Ser)
atgccggtgcggaggggccacgtcgcgccgcagaacaccttcctggacaccatcatccgcaagtttgagggccagagccgtaagtccatcatcgccaacgctcgggtggagaactgcgccgtcatctactgcaacgacggcttctgcgagctgtgcggctactcgcgggccgaggtgatgcagcgaccctgcacctgcgacttcctgcacgggccgcgcacgcagcgccgcgctgccgcgcagatcgcgcaggcactgctgggcgccgaggagcgcaaagtggaaatcgccttctaccggaaagatgggagctgcttcctatgtctggtggatgtggtgcccgtgaagaacgaggatggggctgtcatcatgttcatcctcaatttcgaggtggtgatggagaaggacatggtggggtccccggctcatgacaccaaccaccggggcccccccaccagctggctggccccaggccgcgccaagaccttccgcctgaagctgcccgcgctgctggcgctgacggcccgggagtcgtcggtgcggtcgggcggcgcgggcggcgcgggcgccccgggggccgtggtggtggacgtggacctgacgcccgcggcacccagcagcgagtcgctggccctggacgaagtgacagccatggacaaccacgtggcagggctcgggcccgcggaggagcggcgtgcgctggtgggtcccggctctccgccccgcagcgcgcccggccagctcccatcgccccgggcgcacagcctcaaccccgacgcctcgggctccagctgcagcctggcccggacgcgctcccgagaaagctgcgccagcgtgcgccgcgcctcgtcggccgacgacatcgaggccatgcgcgccggggtgctgcccccgccaccgcgccacgccagcaccggggccatgcacccactgcgcagcggcttgctcaactccacctcggactccgacctcgtgcgctaccgcaccattagcaagattccccaaatcaccctcaactttgtggacctcaagggcgaccccttcttggcttcgcccaccagtgaccgtgagatcatagcacctaagataaaggagcgaacccacaatgtcactgagaaggtcacccaggtcctgtccctgggcgccgacgtgctgcctgagtacaagctgcaggcaccgcgcatccaccgctggaccatcctgcattacagccccttcaaggccgtgtgggactggctcatcctgctgctggtcatctacacggctgtcttcacaccctactcggctgccttcctgctgaaggagacggaagaaggcccgcctgctaccgagtgtggctacgcctgccagccgctggctgtggtggacctcatcgtggacatcatgttcattgtggacatcctcatcaacttccgcaccacctacgtcaatgccaacgaggaggtggtcagccaccccggccgcatcgccgtccactacttcaagggctggttcctcatcgacatggtggccgccatccccttcgacctgctcatcttcggctctggctctgaggagctgatcgggctgctgaagactgcgcggctgctgcggctggtgcgcgtggcgcggaagctggatcgctactcagagtacggcgcggccgtgctgttcttgctcatgtgcacctttgcgctcatcgcgcactggctagcctgcatctggtacgccatcggcaacatggagcagccacacatggactcacgcatcggctggctgcacaacctgggcgaccagataggcaaaccctacaacagcagcggcctgggcggcccctccatcaaggacaagtatgtgacggcgctctacttcaccttcagcagcctcaccagtgtgggcttcggcaacgtctctcccaacaccaactcagagaagatcttctccatctgcgtcatgctcattggctccctcatgtatgctagcatcttcggcaacgtgtcggccatcatccagcggctgtactcgggcacagcccgctaccacacacagatgctgcgggtgcgggagttcatccgcttccaccagatccccaatcccctgcgccagcgcctcgaggagtacttccagcacgcctggtcctacaccaacggcatcgacatgaacgcggtgctgaagggcttccctgagtgcctgcaggctgacatctgcctgcacctgaaccgctcactgctgcagcactgcaaacccttccgaggggccaccaagggctgccttcgggccctggccatgaagttcaagaccacacatgcaccgccaggggacacactggtgcatgctggggacctgctcaccgccctgtacttcatctcccggggctccatcgagatcctgcggggcgacgtcgtcgtggccatcctggggaagaatgacatctttggggagcctctgaacctgtatgcaaggcctggcaagtcgaacggggatgtgcgggccctcacctactgtgacctacacaagatccatcgggacgacctgctggaggtgctggacatgtaccctgagttctccgaccacttctggtccagcctggagatcaccttcaacctgcgagataccaacatgatcccgggctcccccggcagtacggagttagagggtggcttcagtcggcaacgcaagcgcaagttgtccttccgcaggcgcacggacaaggacacggagcagccaggggaggtgtcggccttggggccgggccgggcgggggcagggccgagtagccggggccggccgggggggccgtggggggagagcccgtccagtggcccctccagccctgagagcagtgaggatgagggcccaggccgcagctccagccccctccgcctggtgcccttctccagccccaggccccccggagagccgccgggtggggagcccctgatggaggactgcgagaagagcagcgacacttgcaaccccctgtcaggcgccttctcaggagtgtccaacattttcagcttctggggggacagtcggggccgccagtaccaggagctccctcgatgccccgcccccacccccagcctcctcaacatccccctctccagcccgggtcggcggccccggggcgacgtggagagcaggctggatgccctccagcgccagctcaacaggctggagacccggctgagtgcagacatggccactgtcctgcagctgctacagaggcagatgacgctggtcccgcccgcctacagtgctgtgaccaccccggggcctggccccacttccacatccccgctgttgcccgtcagccccctccccaccctcaccttggactcgctttctcaggtttcccagttcatggcgtgtgaggagctgcccccgggggccccagagcttccccaagaaggccccacacgacgcctctccctaccgggccagctgggggccctcacctcccagcccctgcacagacacggctcggacccgggcagttagtggggctgcccagtgtggacacgtggctcacccagggatcaaggcgctgctgggccgctccccttggaggccctgctcaggaggccctgaccgtggaaggggagaggaactcgaaagcacagctcctcccccagcccttgggaccatcttctcctgcagtcccctgggccccagtgagaggggcaggggcagggccggcagtaggtggggcctgtggtccccccactgccctgagggcattagctggtctaactgcccggaggcacccggccctgggccttaggcacctcaaggacttttctgctatttactgctcttattgttaaggataataattaaggatcatatgaataattaatgaagatgctgatgactatgaataataaataattatcctgaggaga

SEQ ID NO: 1009 - DNA, 3884 bp, Homo sapiens
  source 1..3884: mol_type = genomic DNA
  misc_feature 1..3884: note = cDNA of KCNH2 gene SNP c.872T>C (p.Met291Thr)
atgccggtgcggaggggccacgtcgcgccgcagaacaccttcctggacaccatcatccgcaagtttgagggccagagccgtaagttcatcatcgccaacgctcgggtggagaactgcgccgtcatctactgcaacgacggcttctgcgagctgtgcggctactcgcgggccgaggtgatgcagcgaccctgcacctgcgacttcctgcacgggccgcgcacgcagcgccgcgctgccgcgcagatcgcgcaggcactgctgggcgccgaggagcgcaaagtggaaatcgccttctaccggaaagatgggagctgcttcctatgtctggtggatgtggtgcccgtgaagaacgaggatggggctgtcatcatgttcatcctcaatttcgaggtggtgatggagaaggacatggtggggtccccggctcatgacaccaaccaccggggcccccccaccagctggctggccccaggccgcgccaagaccttccgcctgaagctgcccgcgctgctggcgctgacggcccgggagtcgtcggtgcggtcgggcggcgcgggcggcgcgggcgccccgggggccgtggtggtggacgtggacctgacgcccgcggcacccagcagcgagtcgctggccctggacgaagtgacagccatggacaaccacgtggcagggctcgggcccgcggaggagcggcgtgcgctggtgggtcccggctctccgccccgcagcgcgcccggccagctcccatcgccccgggcgcacagcctcaaccccgacgcctcgggctccagctgcagcctggcccggacgcgctcccgagaaagctgcgccagcgtgcgccgcgcctcgtcggccgacgacatcgaggccacgcgcgccggggtgctgcccccgccaccgcgccacgccagcaccggggccatgcacccactgcgcagcggcttgctcaactccacctcggactccgacctcgtgcgctaccgcaccattagcaagattccccaaatcaccctcaactttgtggacctcaagggcgaccccttcttggcttcgcccaccagtgaccgtgagatcatagcacctaagataaaggagcgaacccacaatgtcactgagaaggtcacccaggtcctgtccctgggcgccgacgtgctgcctgagtacaagctgcaggcaccgcgcatccaccgctggaccatcctgcattacagccccttcaaggccgtgtgggactggctcatcctgctgctggtcatctacacggctgtcttcacaccctactcggctgccttcctgctgaaggagacggaagaaggcccgcctgctaccgagtgtggctacgcctgccagccgctggctgtggtggacctcatcgtggacatcatgttcattgtggacatcctcatcaacttccgcaccacctacgtcaatgccaacgaggaggtggtcagccaccccggccgcatcgccgtccactacttcaagggctggttcctcatcgacatggtggccgccatccccttcgacctgctcatcttcggctctggctctgaggagctgatcgggctgctgaagactgcgcggctgctgcggctggtgcgcgtggcgcggaagctggatcgctactcagagtacggcgcggccgtgctgttcttgctcatgtgcacctttgcgctcatcgcgcactggctagcctgcatctggtacgccatcggcaacatggagcagccacacatggactcacgcatcggctggctgcacaacctgggcgaccagataggcaaaccctacaacagcagcggcctgggcggcccctccatcaaggacaagtatgtgacggcgctctacttcaccttcagcagcctcaccagtgtgggcttcggcaacgtctctcccaacaccaactcagagaagatcttctccatctgcgtcatgctcattggctccctcatgtatgctagcatcttcggcaacgtgtcggccatcatccagcggctgtactcgggcacagcccgctaccacacacagatgctgcgggtgcgggagttcatccgcttccaccagatccccaatcccctgcgccagcgcctcgaggagtacttccagcacgcctggtcctacaccaacggcatcgacatgaacgcggtgctgaagggcttccctgagtgcctgcaggctgacatctgcctgcacctgaaccgctcactgctgcagcactgcaaacccttccgaggggccaccaagggctgccttcgggccctggccatgaagttcaagaccacacatgcaccgccaggggacacactggtgcatgctggggacctgctcaccgccctgtacttcatctcccggggctccatcgagatcctgcggggcgacgtcgtcgtggccatcctggggaagaatgacatctttggggagcctctgaacctgtatgcaaggcctggcaagtcgaacggggatgtgcgggccctcacctactgtgacctacacaagatccatcgggacgacctgctggaggtgctggacatgtaccctgagttctccgaccacttctggtccagcctggagatcaccttcaacctgcgagataccaacatgatcccgggctcccccggcagtacggagttagagggtggcttcagtcggcaacgcaagcgcaagttgtccttccgcaggcgcacggacaaggacacggagcagccaggggaggtgtcggccttggggccgggccgggcgggggcagggccgagtagccggggccggccgggggggccgtggggggagagcccgtccagtggcccctccagccctgagagcagtgaggatgagggcccaggccgcagctccagccccctccgcctggtgcccttctccagccccaggccccccggagagccgccgggtggggagcccctgatggaggactgcgagaagagcagcgacacttgcaaccccctgtcaggcgccttctcaggagtgtccaacattttcagcttctggggggacagtcggggccgccagtaccaggagctccctcgatgccccgcccccacccccagcctcctcaacatccccctctccagcccgggtcggcggccccggggcgacgtggagagcaggctggatgccctccagcgccagctcaacaggctggagacccggctgagtgcagacatggccactgtcctgcagctgctacagaggcagatgacgctggtcccgcccgcctacagtgctgtgaccaccccggggcctggccccacttccacatccccgctgttgcccgtcagccccctccccaccctcaccttggactcgctttctcaggtttcccagttcatggcgtgtgaggagctgcccccgggggccccagagcttccccaagaaggccccacacgacgcctctccctaccgggccagctgggggccctcacctcccagcccctgcacagacacggctcggacccgggcagttagtggggctgcccagtgtggacacgtggctcacccagggatcaaggcgctgctgggccgctccccttggaggccctgctcaggaggccctgaccgtggaaggggagaggaactcgaaagcacagctcctcccccagcccttgggaccatcttctcctgcagtcccctgggccccagtgagaggggcaggggcagggccggcagtaggtggggcctgtggtccccccactgccctgagggcattagctggtctaactgcccggaggcacccggccctgggccttaggcacctcaaggacttttctgctatttactgctcttattgttaaggataataattaaggatcatatgaataattaatgaagatgctgatgactatgaataataaataattatcctgaggaga

SEQ ID NO: 1010 - DNA, 3884 bp, Homo sapiens
  source 1..3884: mol_type = genomic DNA
  misc_feature 1..3884: note = cDNA of KCNH2 gene SNP c.872T>G (p.Met291Arg)
atgccggtgcggaggggccacgtcgcgccgcagaacaccttcctggacaccatcatccgcaagtttgagggccagagccgtaagttcatcatcgccaacgctcgggtggagaactgcgccgtcatctactgcaacgacggcttctgcgagctgtgcggctactcgcgggccgaggtgatgcagcgaccctgcacctgcgacttcctgcacgggccgcgcacgcagcgccgcgctgccgcgcagatcgcgcaggcactgctgggcgccgaggagcgcaaagtggaaatcgccttctaccggaaagatgggagctgcttcctatgtctggtggatgtggtgcccgtgaagaacgaggatggggctgtcatcatgttcatcctcaatttcgaggtggtgatggagaaggacatggtggggtccccggctcatgacaccaaccaccggggcccccccaccagctggctggccccaggccgcgccaagaccttccgcctgaagctgcccgcgctgctggcgctgacggcccgggagtcgtcggtgcggtcgggcggcgcgggcggcgcgggcgccccgggggccgtggtggtggacgtggacctgacgcccgcggcacccagcagcgagtcgctggccctggacgaagtgacagccatggacaaccacgtggcagggctcgggcccgcggaggagcggcgtgcgctggtgggtcccggctctccgccccgcagcgcgcccggccagctcccatcgccccgggcgcacagcctcaaccccgacgcctcgggctccagctgcagcctggcccggacgcgctcccgagaaagctgcgccagcgtgcgccgcgcctcgtcggccgacgacatcgaggccaggcgcgccggggtgctgcccccgccaccgcgccacgccagcaccggggccatgcacccactgcgcagcggcttgctcaactccacctcggactccgacctcgtgcgctaccgcaccattagcaagattccccaaatcaccctcaactttgtggacctcaagggcgaccccttcttggcttcgcccaccagtgaccgtgagatcatagcacctaagataaaggagcgaacccacaatgtcactgagaaggtcacccaggtcctgtccctgggcgccgacgtgctgcctgagtacaagctgcaggcaccgcgcatccaccgctggaccatcctgcattacagccccttcaaggccgtgtgggactggctcatcctgctgctggtcatctacacggctgtcttcacaccctactcggctgccttcctgctgaaggagacggaagaaggcccgcctgctaccgagtgtggctacgcctgccagccgctggctgtggtggacctcatcgtggacatcatgttcattgtggacatcctcatcaacttccgcaccacctacgtcaatgccaacgaggaggtggtcagccaccccggccgcatcgccgtccactacttcaagggctggttcctcatcgacatggtggccgccatccccttcgacctgctcatcttcggctctggctctgaggagctgatcgggctgctgaagactgcgcggctgctgcggctggtgcgcgtggcgcggaagctggatcgctactcagagtacggcgcggccgtgctgttcttgctcatgtgcacctttgcgctcatcgcgcactggctagcctgcatctggtacgccatcggcaacatggagcagccacacatggactcacgcatcggctggctgcacaacctgggcgaccagataggcaaaccctacaacagcagcggcctgggcggcccctccatcaaggacaagtatgtgacggcgctctacttcaccttcagcagcctcaccagtgtgggcttcggcaacgtctctcccaacaccaactcagagaagatcttctccatctgcgtcatgctcattggctccctcatgtatgctagcatcttcggcaacgtgtcggccatcatccagcggctgtactcgggcacagcccgctaccacacacagatgctgcgggtgcgggagttcatccgcttccaccagatccccaatcccctgcgccagcgcctcgaggagtacttccagcacgcctggtcctacaccaacggcatcgacatgaacgcggtgctgaagggcttccctgagtgcctgcaggctgacatctgcctgcacctgaaccgctcactgctgcagcactgcaaacccttccgaggggccaccaagggctgccttcgggccctggccatgaagttcaagaccacacatgcaccgccaggggacacactggtgcatgctggggacctgctcaccgccctgtacttcatctcccggggctccatcgagatcctgcggggcgacgtcgtcgtggccatcctggggaagaatgacatctttggggagcctctgaacctgtatgcaaggcctggcaagtcgaacggggatgtgcgggccctcacctactgtgacctacacaagatccatcgggacgacctgctggaggtgctggacatgtaccctgagttctccgaccacttctggtccagcctggagatcaccttcaacctgcgagataccaacatgatcccgggctcccccggcagtacggagttagagggtggcttcagtcggcaacgcaagcgcaagttgtccttccgcaggcgcacggacaaggacacggagcagccaggggaggtgtcggccttggggccgggccgggcgggggcagggccgagtagccggggccggccgggggggccgtggggggagagcccgtccagtggcccctccagccctgagagcagtgaggatgagggcccaggccgcagctccagccccctccgcctggtgcccttctccagccccaggccccccggagagccgccgggtggggagcccctgatggaggactgcgagaagagcagcgacacttgcaaccccctgtcaggcgccttctcaggagtgtccaacattttcagcttctggggggacagtcggggccgccagtaccaggagctccctcgatgccccgcccccacccccagcctcctcaacatccccctctccagcccgggtcggcggccccggggcgacgtggagagcaggctggatgccctccagcgccagctcaacaggctggagacccggctgagtgcagacatggccactgtcctgcagctgctacagaggcagatgacgctggtcccgcccgcctacagtgctgtgaccaccccggggcctggccccacttccacatccccgctgttgcccgtcagccccctccccaccctcaccttggactcgctttctcaggtttcccagttcatggcgtgtgaggagctgcccccgggggccccagagcttccccaagaaggccccacacgacgcctctccctaccgggccagctgggggccctcacctcccagcccctgcacagacacggctcggacccgggcagttagtggggctgcccagtgtggacacgtggctcacccagggatcaaggcgctgctgggccgctccccttggaggccctgctcaggaggccctgaccgtggaaggggagaggaactcgaaagcacagctcctcccccagcccttgggaccatcttctcctgcagtcccctgggccccagtgagaggggcaggggcagggccggcagtaggtggggcctgtggtccccccactgccctgagggcattagctggtctaactgcccggaggcacccggccctgggccttaggcacctcaaggacttttctgctatttactgctcttattgttaaggataataattaaggatcatatgaataattaatgaagatgctgatgactatgaataataaataattatcctgaggaga

SEQ ID NO: 1011 - DNA, 3884 bp, Homo sapiens
  source 1..3884: mol_type = genomic DNA
  misc_feature 1..3884: note = cDNA of KCNH2 gene SNP c.875G>A (p.Arg292His)
atgccggtgcggaggggccacgtcgcgccgcagaacaccttcctggacaccatcatccgcaagtttgagggccagagccgtaagttcatcatcgccaacgctcgggtggagaactgcgccgtcatctactgcaacgacggcttctgcgagctgtgcggctactcgcgggccgaggtgatgcagcgaccctgcacctgcgacttcctgcacgggccgcgcacgcagcgccgcgctgccgcgcagatcgcgcaggcactgctgggcgccgaggagcgcaaagtggaaatcgccttctaccggaaagatgggagctgcttcctatgtctggtggatgtggtgcccgtgaagaacgaggatggggctgtcatcatgttcatcctcaatttcgaggtggtgatggagaaggacatggtggggtccccggctcatgacaccaaccaccggggcccccccaccagctggctggccccaggccgcgccaagaccttccgcctgaagctgcccgcgctgctggcgctgacggcccgggagtcgtcggtgcggtcgggcggcgcgggcggcgcgggcgccccgggggccgtggtggtggacgtggacctgacgcccgcggcacccagcagcgagtcgctggccctggacgaagtgacagccatggacaaccacgtggcagggctcgggcccgcggaggagcggcgtgcgctggtgggtcccggctctccgccccgcagcgcgcccggccagctcccatcgccccgggcgcacagcctcaaccccgacgcctcgggctccagctgcagcctggcccggacgcgctcccgagaaagctgcgccagcgtgcgccgcgcctcgtcggccgacgacatcgaggccatgcacgccggggtgctgcccccgccaccgcgccacgccagcaccggggccatgcacccactgcgcagcggcttgctcaactccacctcggactccgacctcgtgcgctaccgcaccattagcaagattccccaaatcaccctcaactttgtggacctcaagggcgaccccttcttggcttcgcccaccagtgaccgtgagatcatagcacctaagataaaggagcgaacccacaatgtcactgagaaggtcacccaggtcctgtccctgggcgccgacgtgctgcctgagtacaagctgcaggcaccgcgcatccaccgctggaccatcctgcattacagccccttcaaggccgtgtgggactggctcatcctgctgctggtcatctacacggctgtcttcacaccctactcggctgccttcctgctgaaggagacggaagaaggcccgcctgctaccgagtgtggctacgcctgccagccgctggctgtggtggacctcatcgtggacatcatgttcattgtggacatcctcatcaacttccgcaccacctacgtcaatgccaacgaggaggtggtcagccaccccggccgcatcgccgtccactacttcaagggctggttcctcatcgacatggtggccgccatccccttcgacctgctcatcttcggctctggctctgaggagctgatcgggctgctgaagactgcgcggctgctgcggctggtgcgcgtggcgcggaagctggatcgctactcagagtacggcgcggccgtgctgttcttgctcatgtgcacctttgcgctcatcgcgcactggctagcctgcatctggtacgccatcggcaacatggagcagccacacatggactcacgcatcggctggctgcacaacctgggcgaccagataggcaaaccctacaacagcagcggcctgggcggcccctccatcaaggacaagtatgtgacggcgctctacttcaccttcagcagcctcaccagtgtgggcttcggcaacgtctctcccaacaccaactcagagaagatcttctccatctgcgtcatgctcattggctccctcatgtatgctagcatcttcggcaacgtgtcggccatcatccagcggctgtactcgggcacagcccgctaccacacacagatgctgcgggtgcgggagttcatccgcttccaccagatccccaatcccctgcgccagcgcctcgaggagtacttccagcacgcctggtcctacaccaacggcatcgacatgaacgcggtgctgaagggcttccctgagtgcctgcaggctgacatctgcctgcacctgaaccgctcactgctgcagcactgcaaacccttccgaggggccaccaagggctgccttcgggccctggccatgaagttcaagaccacacatgcaccgccaggggacacactggtgcatgctggggacctgctcaccgccctgtacttcatctcccggggctccatcgagatcctgcggggcgacgtcgtcgtggccatcctggggaagaatgacatctttggggagcctctgaacctgtatgcaaggcctggcaagtcgaacggggatgtgcgggccctcacctactgtgacctacacaagatccatcgggacgacctgctggaggtgctggacatgtaccctgagttctccgaccacttctggtccagcctggagatcaccttcaacctgcgagataccaacatgatcccgggctcccccggcagtacggagttagagggtggcttcagtcggcaacgcaagcgcaagttgtccttccgcaggcgcacggacaaggacacggagcagccaggggaggtgtcggccttggggccgggccgggcgggggcagggccgagtagccggggccggccgggggggccgtggggggagagcccgtccagtggcccctccagccctgagagcagtgaggatgagggcccaggccgcagctccagccccctccgcctggtgcccttctccagccccaggccccccggagagccgccgggtggggagcccctgatggaggactgcgagaagagcagcgacacttgcaaccccctgtcaggcgccttctcaggagtgtccaacattttcagcttctggggggacagtcggggccgccagtaccaggagctccctcgatgccccgcccccacccccagcctcctcaacatccccctctccagcccgggtcggcggccccggggcgacgtggagagcaggctggatgccctccagcgccagctcaacaggctggagacccggctgagtgcagacatggccactgtcctgcagctgctacagaggcagatgacgctggtcccgcccgcctacagtgctgtgaccaccccggggcctggccccacttccacatccccgctgttgcccgtcagccccctccccaccctcaccttggactcgctttctcaggtttcccagttcatggcgtgtgaggagctgcccccgggggccccagagcttccccaagaaggccccacacgacgcctctccctaccgggccagctgggggccctcacctcccagcccctgcacagacacggctcggacccgggcagttagtggggctgcccagtgtggacacgtggctcacccagggatcaaggcgctgctgggccgctccccttggaggccctgctcaggaggccctgaccgtggaaggggagaggaactcgaaagcacagctcctcccccagcccttgggaccatcttctcctgcagtcccctgggccccagtgagaggggcaggggcagggccggcagtaggtggggcctgtggtccccccactgccctgagggcattagctggtctaactgcccggaggcacccggccctgggccttaggcacctcaaggacttttctgctatttactgctcttattgttaaggataataattaaggatcatatgaataattaatgaagatgctgatgactatgaataataaataattatcctgaggaga

SEQ ID NO: 1012 - DNA, 3884 bp, Homo sapiens
  source 1..3884: mol_type = genomic DNA
  misc_feature 1..3884: note = cDNA of KCNH2 gene SNP c.877G>A (p.Ala293Thr)
atgccggtgcggaggggccacgtcgcgccgcagaacaccttcctggacaccatcatccgcaagtttgagggccagagccgtaagttcatcatcgccaacgctcgggtggagaactgcgccgtcatctactgcaacgacggcttctgcgagctgtgcggctactcgcgggccgaggtgatgcagcgaccctgcacctgcgacttcctgcacgggccgcgcacgcagcgccgcgctgccgcgcagatcgcgcaggcactgctgggcgccgaggagcgcaaagtggaaatcgccttctaccggaaagatgggagctgcttcctatgtctggtggatgtggtgcccgtgaagaacgaggatggggctgtcatcatgttcatcctcaatttcgaggtggtgatggagaaggacatggtggggtccccggctcatgacaccaaccaccggggcccccccaccagctggctggccccaggccgcgccaagaccttccgcctgaagctgcccgcgctgctggcgctgacggcccgggagtcgtcggtgcggtcgggcggcgcgggcggcgcgggcgccccgggggccgtggtggtggacgtggacctgacgcccgcggcacccagcagcgagtcgctggccctggacgaagtgacagccatggacaaccacgtggcagggctcgggcccgcggaggagcggcgtgcgctggtgggtcccggctctccgccccgcagcgcgcccggccagctcccatcgccccgggcgcacagcctcaaccccgacgcctcgggctccagctgcagcctggcccggacgcgctcccgagaaagctgcgccagcgtgcgccgcgcctcgtcggccgacgacatcgaggccatgcgcaccggggtgctgcccccgccaccgcgccacgccagcaccggggccatgcacccactgcgcagcggcttgctcaactccacctcggactccgacctcgtgcgctaccgcaccattagcaagattccccaaatcaccctcaactttgtggacctcaagggcgaccccttcttggcttcgcccaccagtgaccgtgagatcatagcacctaagataaaggagcgaacccacaatgtcactgagaaggtcacccaggtcctgtccctgggcgccgacgtgctgcctgagtacaagctgcaggcaccgcgcatccaccgctggaccatcctgcattacagccccttcaaggccgtgtgggactggctcatcctgctgctggtcatctacacggctgtcttcacaccctactcggctgccttcctgctgaaggagacggaagaaggcccgcctgctaccgagtgtggctacgcctgccagccgctggctgtggtggacctcatcgtggacatcatgttcattgtggacatcctcatcaacttccgcaccacctacgtcaatgccaacgaggaggtggtcagccaccccggccgcatcgccgtccactacttcaagggctggttcctcatcgacatggtggccgccatccccttcgacctgctcatcttcggctctggctctgaggagctgatcgggctgctgaagactgcgcggctgctgcggctggtgcgcgtggcgcggaagctggatcgctactcagagtacggcgcggccgtgctgttcttgctcatgtgcacctttgcgctcatcgcgcactggctagcctgcatctggtacgccatcggcaacatggagcagccacacatggactcacgcatcggctggctgcacaacctgggcgaccagataggcaaaccctacaacagcagcggcctgggcggcccctccatcaaggacaagtatgtgacggcgctctacttcaccttcagcagcctcaccagtgtgggcttcggcaacgtctctcccaacaccaactcagagaagatcttctccatctgcgtcatgctcattggctccctcatgtatgctagcatcttcggcaacgtgtcggccatcatccagcggctgtactcgggcacagcccgctaccacacacagatgctgcgggtgcgggagttcatccgcttccaccagatccccaatcccctgcgccagcgcctcgaggagtacttccagcacgcctggtcctacaccaacggcatcgacatgaacgcggtgctgaagggcttccctgagtgcctgcaggctgacatctgcctgcacctgaaccgctcactgctgcagcactgcaaacccttccgaggggccaccaagggctgccttcgggccctggccatgaagttcaagaccacacatgcaccgccaggggacacactggtgcatgctggggacctgctcaccgccctgtacttcatctcccggggctccatcgagatcctgcggggcgacgtcgtcgtggccatcctggggaagaatgacatctttggggagcctctgaacctgtatgcaaggcctggcaagtcgaacggggatgtgcgggccctcacctactgtgacctacacaagatccatcgggacgacctgctggaggtgctggacatgtaccctgagttctccgaccacttctggtccagcctggagatcaccttcaacctgcgagataccaacatgatcccgggctcccccggcagtacggagttagagggtggcttcagtcggcaacgcaagcgcaagttgtccttccgcaggcgcacggacaaggacacggagcagccaggggaggtgtcggccttggggccgggccgggcgggggcagggccgagtagccggggccggccgggggggccgtggggggagagcccgtccagtggcccctccagccctgagagcagtgaggatgagggcccaggccgcagctccagccccctccgcctggtgcccttctccagccccaggccccccggagagccgccgggtggggagcccctgatggaggactgcgagaagagcagcgacacttgcaaccccctgtcaggcgccttctcaggagtgtccaacattttcagcttctggggggacagtcggggccgccagtaccaggagctccctcgatgccccgcccccacccccagcctcctcaacatccccctctccagcccgggtcggcggccccggggcgacgtggagagcaggctggatgccctccagcgccagctcaacaggctggagacccggctgagtgcagacatggccactgtcctgcagctgctacagaggcagatgacgctggtcccgcccgcctacagtgctgtgaccaccccggggcctggccccacttccacatccccgctgttgcccgtcagccccctccccaccctcaccttggactcgctttctcaggtttcccagttcatggcgtgtgaggagctgcccccgggggccccagagcttccccaagaaggccccacacgacgcctctccctaccgggccagctgggggccctcacctcccagcccctgcacagacacggctcggacccgggcagttagtggggctgcccagtgtggacacgtggctcacccagggatcaaggcgctgctgggccgctccccttggaggccctgctcaggaggccctgaccgtggaaggggagaggaactcgaaagcacagctcctcccccagcccttgggaccatcttctcctgcagtcccctgggccccagtgagaggggcaggggcagggccggcagtaggtggggcctgtggtccccccactgccctgagggcattagctggtctaactgcccggaggcacccggccctgggccttaggcacctcaaggacttttctgctatttactgctcttattgttaaggataataattaaggatcatatgaataattaatgaagatgctgatgactatgaataataaataattatcctgaggaga

SEQ ID NO: 1013 - DNA, 3884 bp, Homo sapiens
  source 1..3884: mol_type = genomic DNA
  misc_feature 1..3884: note = cDNA of KCNH2 gene SNP c.877G>T (p.Ala293Ser)
atgccggtgcggaggggccacgtcgcgccgcagaacaccttcctggacaccatcatccgcaagtttgagggccagagccgtaagttcatcatcgccaacgctcgggtggagaactgcgccgtcatctactgcaacgacggcttctgcgagctgtgcggctactcgcgggccgaggtgatgcagcgaccctgcacctgcgacttcctgcacgggccgcgcacgcagcgccgcgctgccgcgcagatcgcgcaggcactgctgggcgccgaggagcgcaaagtggaaatcgccttctaccggaaagatgggagctgcttcctatgtctggtggatgtggtgcccgtgaagaacgaggatggggctgtcatcatgttcatcctcaatttcgaggtggtgatggagaaggacatggtggggtccccggctcatgacaccaaccaccggggcccccccaccagctggctggccccaggccgcgccaagaccttccgcctgaagctgcccgcgctgctggcgctgacggcccgggagtcgtcggtgcggtcgggcggcgcgggcggcgcgggcgccccgggggccgtggtggtggacgtggacctgacgcccgcggcacccagcagcgagtcgctggccctggacgaagtgacagccatggacaaccacgtggcagggctcgggcccgcggaggagcggcgtgcgctggtgggtcccggctctccgccccgcagcgcgcccggccagctcccatcgccccgggcgcacagcctcaaccccgacgcctcgggctccagctgcagcctggcccggacgcgctcccgagaaagctgcgccagcgtgcgccgcgcctcgtcggccgacgacatcgaggccatgcgctccggggtgctgcccccgccaccgcgccacgccagcaccggggccatgcacccactgcgcagcggcttgctcaactccacctcggactccgacctcgtgcgctaccgcaccattagcaagattccccaaatcaccctcaactttgtggacctcaagggcgaccccttcttggcttcgcccaccagtgaccgtgagatcatagcacctaagataaaggagcgaacccacaatgtcactgagaaggtcacccaggtcctgtccctgggcgccgacgtgctgcctgagtacaagctgcaggcaccgcgcatccaccgctggaccatcctgcattacagccccttcaaggccgtgtgggactggctcatcctgctgctggtcatctacacggctgtcttcacaccctactcggctgccttcctgctgaaggagacggaagaaggcccgcctgctaccgagtgtggctacgcctgccagccgctggctgtggtggacctcatcgtggacatcatgttcattgtggacatcctcatcaacttccgcaccacctacgtcaatgccaacgaggaggtggtcagccaccccggccgcatcgccgtccactacttcaagggctggttcctcatcgacatggtggccgccatccccttcgacctgctcatcttcggctctggctctgaggagctgatcgggctgctgaagactgcgcggctgctgcggctggtgcgcgtggcgcggaagctggatcgctactcagagtacggcgcggccgtgctgttcttgctcatgtgcacctttgcgctcatcgcgcactggctagcctgcatctggtacgccatcggcaacatggagcagccacacatggactcacgcatcggctggctgcacaacctgggcgaccagataggcaaaccctacaacagcagcggcctgggcggcccctccatcaaggacaagtatgtgacggcgctctacttcaccttcagcagcctcaccagtgtgggcttcggcaacgtctctcccaacaccaactcagagaagatcttctccatctgcgtcatgctcattggctccctcatgtatgctagcatcttcggcaacgtgtcggccatcatccagcggctgtactcgggcacagcccgctaccacacacagatgctgcgggtgcgggagttcatccgcttccaccagatccccaatcccctgcgccagcgcctcgaggagtacttccagcacgcctggtcctacaccaacggcatcgacatgaacgcggtgctgaagggcttccctgagtgcctgcaggctgacatctgcctgcacctgaaccgctcactgctgcagcactgcaaacccttccgaggggccaccaagggctgccttcgggccctggccatgaagttcaagaccacacatgcaccgccaggggacacactggtgcatgctggggacctgctcaccgccctgtacttcatctcccggggctccatcgagatcctgcggggcgacgtcgtcgtggccatcctggggaagaatgacatctttggggagcctctgaacctgtatgcaaggcctggcaagtcgaacggggatgtgcgggccctcacctactgtgacctacacaagatccatcgggacgacctgctggaggtgctggacatgtaccctgagttctccgaccacttctggtccagcctggagatcaccttcaacctgcgagataccaacatgatcccgggctcccccggcagtacggagttagagggtggcttcagtcggcaacgcaagcgcaagttgtccttccgcaggcgcacggacaaggacacggagcagccaggggaggtgtcggccttggggccgggccgggcgggggcagggccgagtagccggggccggccgggggggccgtggggggagagcccgtccagtggcccctccagccctgagagcagtgaggatgagggcccaggccgcagctccagccccctccgcctggtgcccttctccagccccaggccccccggagagccgccgggtggggagcccctgatggaggactgcgagaagagcagcgacacttgcaaccccctgtcaggcgccttctcaggagtgtccaacattttcagcttctggggggacagtcggggccgccagtaccaggagctccctcgatgccccgcccccacccccagcctcctcaacatccccctctccagcccgggtcggcggccccggggcgacgtggagagcaggctggatgccctccagcgccagctcaacaggctggagacccggctgagtgcagacatggccactgtcctgcagctgctacagaggcagatgacgctggtcccgcccgcctacagtgctgtgaccaccccggggcctggccccacttccacatccccgctgttgcccgtcagccccctccccaccctcaccttggactcgctttctcaggtttcccagttcatggcgtgtgaggagctgcccccgggggccccagagcttccccaagaaggccccacacgacgcctctccctaccgggccagctgggggccctcacctcccagcccctgcacagacacggctcggacccgggcagttagtggggctgcccagtgtggacacgtggctcacccagggatcaaggcgctgctgggccgctccccttggaggccctgctcaggaggccctgaccgtggaaggggagaggaactcgaaagcacagctcctcccccagcccttgggaccatcttctcctgcagtcccctgggccccagtgagaggggcaggggcagggccggcagtaggtggggcctgtggtccccccactgccctgagggcattagctggtctaactgcccggaggcacccggccctgggccttaggcacctcaaggacttttctgctatttactgctcttattgttaaggataataattaaggatcatatgaataattaatgaagatgctgatgactatgaataataaataattatcctgaggaga

SEQ ID NO: 1014 - DNA, 3884 bp, Homo sapiens
  source 1..3884: mol_type = genomic DNA
  misc_feature 1..3884: note = cDNA of KCNH2 gene SNP c.87C>A (p.Phe29Leu)
atgccggtgcggaggggccacgtcgcgccgcagaacaccttcctggacaccatcatccgcaagtttgagggccagagccgtaagttaatcatcgccaacgctcgggtggagaactgcgccgtcatctactgcaacgacggcttctgcgagctgtgcggctactcgcgggccgaggtgatgcagcgaccctgcacctgcgacttcctgcacgggccgcgcacgcagcgccgcgctgccgcgcagatcgcgcaggcactgctgggcgccgaggagcgcaaagtggaaatcgccttctaccggaaagatgggagctgcttcctatgtctggtggatgtggtgcccgtgaagaacgaggatggggctgtcatcatgttcatcctcaatttcgaggtggtgatggagaaggacatggtggggtccccggctcatgacaccaaccaccggggcccccccaccagctggctggccccaggccgcgccaagaccttccgcctgaagctgcccgcgctgctggcgctgacggcccgggagtcgtcggtgcggtcgggcggcgcgggcggcgcgggcgccccgggggccgtggtggtggacgtggacctgacgcccgcggcacccagcagcgagtcgctggccctggacgaagtgacagccatggacaaccacgtggcagggctcgggcccgcggaggagcggcgtgcgctggtgggtcccggctctccgccccgcagcgcgcccggccagctcccatcgccccgggcgcacagcctcaaccccgacgcctcgggctccagctgcagcctggcccggacgcgctcccgagaaagctgcgccagcgtgcgccgcgcctcgtcggccgacgacatcgaggccatgcgcgccggggtgctgcccccgccaccgcgccacgccagcaccggggccatgcacccactgcgcagcggcttgctcaactccacctcggactccgacctcgtgcgctaccgcaccattagcaagattccccaaatcaccctcaactttgtggacctcaagggcgaccccttcttggcttcgcccaccagtgaccgtgagatcatagcacctaagataaaggagcgaacccacaatgtcactgagaaggtcacccaggtcctgtccctgggcgccgacgtgctgcctgagtacaagctgcaggcaccgcgcatccaccgctggaccatcctgcattacagccccttcaaggccgtgtgggactggctcatcctgctgctggtcatctacacggctgtcttcacaccctactcggctgccttcctgctgaaggagacggaagaaggcccgcctgctaccgagtgtggctacgcctgccagccgctggctgtggtggacctcatcgtggacatcatgttcattgtggacatcctcatcaacttccgcaccacctacgtcaatgccaacgaggaggtggtcagccaccccggccgcatcgccgtccactacttcaagggctggttcctcatcgacatggtggccgccatccccttcgacctgctcatcttcggctctggctctgaggagctgatcgggctgctgaagactgcgcggctgctgcggctggtgcgcgtggcgcggaagctggatcgctactcagagtacggcgcggccgtgctgttcttgctcatgtgcacctttgcgctcatcgcgcactggctagcctgcatctggtacgccatcggcaacatggagcagccacacatggactcacgcatcggctggctgcacaacctgggcgaccagataggcaaaccctacaacagcagcggcctgggcggcccctccatcaaggacaagtatgtgacggcgctctacttcaccttcagcagcctcaccagtgtgggcttcggcaacgtctctcccaacaccaactcagagaagatcttctccatctgcgtcatgctcattggctccctcatgtatgctagcatcttcggcaacgtgtcggccatcatccagcggctgtactcgggcacagcccgctaccacacacagatgctgcgggtgcgggagttcatccgcttccaccagatccccaatcccctgcgccagcgcctcgaggagtacttccagcacgcctggtcctacaccaacggcatcgacatgaacgcggtgctgaagggcttccctgagtgcctgcaggctgacatctgcctgcacctgaaccgctcactgctgcagcactgcaaacccttccgaggggccaccaagggctgccttcgggccctggccatgaagttcaagaccacacatgcaccgccaggggacacactggtgcatgctggggacctgctcaccgccctgtacttcatctcccggggctccatcgagatcctgcggggcgacgtcgtcgtggccatcctggggaagaatgacatctttggggagcctctgaacctgtatgcaaggcctggcaagtcgaacggggatgtgcgggccctcacctactgtgacctacacaagatccatcgggacgacctgctggaggtgctggacatgtaccctgagttctccgaccacttctggtccagcctggagatcaccttcaacctgcgagataccaacatgatcccgggctcccccggcagtacggagttagagggtggcttcagtcggcaacgcaagcgcaagttgtccttccgcaggcgcacggacaaggacacggagcagccaggggaggtgtcggccttggggccgggccgggcgggggcagggccgagtagccggggccggccgggggggccgtggggggagagcccgtccagtggcccctccagccctgagagcagtgaggatgagggcccaggccgcagctccagccccctccgcctggtgcccttctccagccccaggccccccggagagccgccgggtggggagcccctgatggaggactgcgagaagagcagcgacacttgcaaccccctgtcaggcgccttctcaggagtgtccaacattttcagcttctggggggacagtcggggccgccagtaccaggagctccctcgatgccccgcccccacccccagcctcctcaacatccccctctccagcccgggtcggcggccccggggcgacgtggagagcaggctggatgccctccagcgccagctcaacaggctggagacccggctgagtgcagacatggccactgtcctgcagctgctacagaggcagatgacgctggtcccgcccgcctacagtgctgtgaccaccccggggcctggccccacttccacatccccgctgttgcccgtcagccccctccccaccctcaccttggactcgctttctcaggtttcccagttcatggcgtgtgaggagctgcccccgggggccccagagcttccccaagaaggccccacacgacgcctctccctaccgggccagctgggggccctcacctcccagcccctgcacagacacggctcggacccgggcagttagtggggctgcccagtgtggacacgtggctcacccagggatcaaggcgctgctgggccgctccccttggaggccctgctcaggaggccctgaccgtggaaggggagaggaactcgaaagcacagctcctcccccagcccttgggaccatcttctcctgcagtcccctgggccccagtgagaggggcaggggcagggccggcagtaggtggggcctgtggtccccccactgccctgagggcattagctggtctaactgcccggaggcacccggccctgggccttaggcacctcaaggacttttctgctatttactgctcttattgttaaggataataattaaggatcatatgaataattaatgaagatgctgatgactatgaataataaataattatcctgaggaga

SEQ ID NO: 1015 - DNA, 3884 bp, Homo sapiens
  source 1..3884: mol_type = genomic DNA
  misc_feature 1..3884: note = cDNA of KCNH2 gene SNP c.880G>A (p.Gly294Arg)
atgccggtgcggaggggccacgtcgcgccgcagaacaccttcctggacaccatcatccgcaagtttgagggccagagccgtaagttcatcatcgccaacgctcgggtggagaactgcgccgtcatctactgcaacgacggcttctgcgagctgtgcggctactcgcgggccgaggtgatgcagcgaccctgcacctgcgacttcctgcacgggccgcgcacgcagcgccgcgctgccgcgcagatcgcgcaggcactgctgggcgccgaggagcgcaaagtggaaatcgccttctaccggaaagatgggagctgcttcctatgtctggtggatgtggtgcccgtgaagaacgaggatggggctgtcatcatgttcatcctcaatttcgaggtggtgatggagaaggacatggtggggtccccggctcatgacaccaaccaccggggcccccccaccagctggctggccccaggccgcgccaagaccttccgcctgaagctgcccgcgctgctggcgctgacggcccgggagtcgtcggtgcggtcgggcggcgcgggcggcgcgggcgccccgggggccgtggtggtggacgtggacctgacgcccgcggcacccagcagcgagtcgctggccctggacgaagtgacagccatggacaaccacgtggcagggctcgggcccgcggaggagcggcgtgcgctggtgggtcccggctctccgccccgcagcgcgcccggccagctcccatcgccccgggcgcacagcctcaaccccgacgcctcgggctccagctgcagcctggcccggacgcgctcccgagaaagctgcgccagcgtgcgccgcgcctcgtcggccgacgacatcgaggccatgcgcgccagggtgctgcccccgccaccgcgccacgccagcaccggggccatgcacccactgcgcagcggcttgctcaactccacctcggactccgacctcgtgcgctaccgcaccattagcaagattccccaaatcaccctcaactttgtggacctcaagggcgaccccttcttggcttcgcccaccagtgaccgtgagatcatagcacctaagataaaggagcgaacccacaatgtcactgagaaggtcacccaggtcctgtccctgggcgccgacgtgctgcctgagtacaagctgcaggcaccgcgcatccaccgctggaccatcctgcattacagccccttcaaggccgtgtgggactggctcatcctgctgctggtcatctacacggctgtcttcacaccctactcggctgccttcctgctgaaggagacggaagaaggcccgcctgctaccgagtgtggctacgcctgccagccgctggctgtggtggacctcatcgtggacatcatgttcattgtggacatcctcatcaacttccgcaccacctacgtcaatgccaacgaggaggtggtcagccaccccggccgcatcgccgtccactacttcaagggctggttcctcatcgacatggtggccgccatccccttcgacctgctcatcttcggctctggctctgaggagctgatcgggctgctgaagactgcgcggctgctgcggctggtgcgcgtggcgcggaagctggatcgctactcagagtacggcgcggccgtgctgttcttgctcatgtgcacctttgcgctcatcgcgcactggctagcctgcatctggtacgccatcggcaacatggagcagccacacatggactcacgcatcggctggctgcacaacctgggcgaccagataggcaaaccctacaacagcagcggcctgggcggcccctccatcaaggacaagtatgtgacggcgctctacttcaccttcagcagcctcaccagtgtgggcttcggcaacgtctctcccaacaccaactcagagaagatcttctccatctgcgtcatgctcattggctccctcatgtatgctagcatcttcggcaacgtgtcggccatcatccagcggctgtactcgggcacagcccgctaccacacacagatgctgcgggtgcgggagttcatccgcttccaccagatccccaatcccctgcgccagcgcctcgaggagtacttccagcacgcctggtcctacaccaacggcatcgacatgaacgcggtgctgaagggcttccctgagtgcctgcaggctgacatctgcctgcacctgaaccgctcactgctgcagcactgcaaacccttccgaggggccaccaagggctgccttcgggccctggccatgaagttcaagaccacacatgcaccgccaggggacacactggtgcatgctggggacctgctcaccgccctgtacttcatctcccggggctccatcgagatcctgcggggcgacgtcgtcgtggccatcctggggaagaatgacatctttggggagcctctgaacctgtatgcaaggcctggcaagtcgaacggggatgtgcgggccctcacctactgtgacctacacaagatccatcgggacgacctgctggaggtgctggacatgtaccctgagttctccgaccacttctggtccagcctggagatcaccttcaacctgcgagataccaacatgatcccgggctcccccggcagtacggagttagagggtggcttcagtcggcaacgcaagcgcaagttgtccttccgcaggcgcacggacaaggacacggagcagccaggggaggtgtcggccttggggccgggccgggcgggggcagggccgagtagccggggccggccgggggggccgtggggggagagcccgtccagtggcccctccagccctgagagcagtgaggatgagggcccaggccgcagctccagccccctccgcctggtgcccttctccagccccaggccccccggagagccgccgggtggggagcccctgatggaggactgcgagaagagcagcgacacttgcaaccccctgtcaggcgccttctcaggagtgtccaacattttcagcttctggggggacagtcggggccgccagtaccaggagctccctcgatgccccgcccccacccccagcctcctcaacatccccctctccagcccgggtcggcggccccggggcgacgtggagagcaggctggatgccctccagcgccagctcaacaggctggagacccggctgagtgcagacatggccactgtcctgcagctgctacagaggcagatgacgctggtcccgcccgcctacagtgctgtgaccaccccggggcctggccccacttccacatccccgctgttgcccgtcagccccctccccaccctcaccttggactcgctttctcaggtttcccagttcatggcgtgtgaggagctgcccccgggggccccagagcttccccaagaaggccccacacgacgcctctccctaccgggccagctgggggccctcacctcccagcccctgcacagacacggctcggacccgggcagttagtggggctgcccagtgtggacacgtggctcacccagggatcaaggcgctgctgggccgctccccttggaggccctgctcaggaggccctgaccgtggaaggggagaggaactcgaaagcacagctcctcccccagcccttgggaccatcttctcctgcagtcccctgggccccagtgagaggggcaggggcagggccggcagtaggtggggcctgtggtccccccactgccctgagggcattagctggtctaactgcccggaggcacccggccctgggccttaggcacctcaaggacttttctgctatttactgctcttattgttaaggataataattaaggatcatatgaataattaatgaagatgctgatgactatgaataataaataattatcctgaggaga

SEQ ID NO: 1016 - DNA, 3884 bp, Homo sapiens
  source 1..3884: mol_type = genomic DNA
  misc_feature 1..3884: note = cDNA of KCNH2 gene SNP c.881G>T (p.Gly294Val)
atgccggtgcggaggggccacgtcgcgccgcagaacaccttcctggacaccatcatccgcaagtttgagggccagagccgtaagttcatcatcgccaacgctcgggtggagaactgcgccgtcatctactgcaacgacggcttctgcgagctgtgcggctactcgcgggccgaggtgatgcagcgaccctgcacctgcgacttcctgcacgggccgcgcacgcagcgccgcgctgccgcgcagatcgcgcaggcactgctgggcgccgaggagcgcaaagtggaaatcgccttctaccggaaagatgggagctgcttcctatgtctggtggatgtggtgcccgtgaagaacgaggatggggctgtcatcatgttcatcctcaatttcgaggtggtgatggagaaggacatggtggggtccccggctcatgacaccaaccaccggggcccccccaccagctggctggccccaggccgcgccaagaccttccgcctgaagctgcccgcgctgctggcgctgacggcccgggagtcgtcggtgcggtcgggcggcgcgggcggcgcgggcgccccgggggccgtggtggtggacgtggacctgacgcccgcggcacccagcagcgagtcgctggccctggacgaagtgacagccatggacaaccacgtggcagggctcgggcccgcggaggagcggcgtgcgctggtgggtcccggctctccgccccgcagcgcgcccggccagctcccatcgccccgggcgcacagcctcaaccccgacgcctcgggctccagctgcagcctggcccggacgcgctcccgagaaagctgcgccagcgtgcgccgcgcctcgtcggccgacgacatcgaggccatgcgcgccgtggtgctgcccccgccaccgcgccacgccagcaccggggccatgcacccactgcgcagcggcttgctcaactccacctcggactccgacctcgtgcgctaccgcaccattagcaagattccccaaatcaccctcaactttgtggacctcaagggcgaccccttcttggcttcgcccaccagtgaccgtgagatcatagcacctaagataaaggagcgaacccacaatgtcactgagaaggtcacccaggtcctgtccctgggcgccgacgtgctgcctgagtacaagctgcaggcaccgcgcatccaccgctggaccatcctgcattacagccccttcaaggccgtgtgggactggctcatcctgctgctggtcatctacacggctgtcttcacaccctactcggctgccttcctgctgaaggagacggaagaaggcccgcctgctaccgagtgtggctacgcctgccagccgctggctgtggtggacctcatcgtggacatcatgttcattgtggacatcctcatcaacttccgcaccacctacgtcaatgccaacgaggaggtggtcagccaccccggccgcatcgccgtccactacttcaagggctggttcctcatcgacatggtggccgccatccccttcgacctgctcatcttcggctctggctctgaggagctgatcgggctgctgaagactgcgcggctgctgcggctggtgcgcgtggcgcggaagctggatcgctactcagagtacggcgcggccgtgctgttcttgctcatgtgcacctttgcgctcatcgcgcactggctagcctgcatctggtacgccatcggcaacatggagcagccacacatggactcacgcatcggctggctgcacaacctgggcgaccagataggcaaaccctacaacagcagcggcctgggcggcccctccatcaaggacaagtatgtgacggcgctctacttcaccttcagcagcctcaccagtgtgggcttcggcaacgtctctcccaacaccaactcagagaagatcttctccatctgcgtcatgctcattggctccctcatgtatgctagcatcttcggcaacgtgtcggccatcatccagcggctgtactcgggcacagcccgctaccacacacagatgctgcgggtgcgggagttcatccgcttccaccagatccccaatcccctgcgccagcgcctcgaggagtacttccagcacgcctggtcctacaccaacggcatcgacatgaacgcggtgctgaagggcttccctgagtgcctgcaggctgacatctgcctgcacctgaaccgctcactgctgcagcactgcaaacccttccgaggggccaccaagggctgccttcgggccctggccatgaagttcaagaccacacatgcaccgccaggggacacactggtgcatgctggggacctgctcaccgccctgtacttcatctcccggggctccatcgagatcctgcggggcgacgtcgtcgtggccatcctggggaagaatgacatctttggggagcctctgaacctgtatgcaaggcctggcaagtcgaacggggatgtgcgggccctcacctactgtgacctacacaagatccatcgggacgacctgctggaggtgctggacatgtaccctgagttctccgaccacttctggtccagcctggagatcaccttcaacctgcgagataccaacatgatcccgggctcccccggcagtacggagttagagggtggcttcagtcggcaacgcaagcgcaagttgtccttccgcaggcgcacggacaaggacacggagcagccaggggaggtgtcggccttggggccgggccgggcgggggcagggccgagtagccggggccggccgggggggccgtggggggagagcccgtccagtggcccctccagccctgagagcagtgaggatgagggcccaggccgcagctccagccccctccgcctggtgcccttctccagccccaggccccccggagagccgccgggtggggagcccctgatggaggactgcgagaagagcagcgacacttgcaaccccctgtcaggcgccttctcaggagtgtccaacattttcagcttctggggggacagtcggggccgccagtaccaggagctccctcgatgccccgcccccacccccagcctcctcaacatccccctctccagcccgggtcggcggccccggggcgacgtggagagcaggctggatgccctccagcgccagctcaacaggctggagacccggctgagtgcagacatggccactgtcctgcagctgctacagaggcagatgacgctggtcccgcccgcctacagtgctgtgaccaccccggggcctggccccacttccacatccccgctgttgcccgtcagccccctccccaccctcaccttggactcgctttctcaggtttcccagttcatggcgtgtgaggagctgcccccgggggccccagagcttccccaagaaggccccacacgacgcctctccctaccgggccagctgggggccctcacctcccagcccctgcacagacacggctcggacccgggcagttagtggggctgcccagtgtggacacgtggctcacccagggatcaaggcgctgctgggccgctccccttggaggccctgctcaggaggccctgaccgtggaaggggagaggaactcgaaagcacagctcctcccccagcccttgggaccatcttctcctgcagtcccctgggccccagtgagaggggcaggggcagggccggcagtaggtggggcctgtggtccccccactgccctgagggcattagctggtctaactgcccggaggcacccggccctgggccttaggcacctcaaggacttttctgctatttactgctcttattgttaaggataataattaaggatcatatgaataattaatgaagatgctgatgactatgaataataaataattatcctgaggaga

SEQ ID NO: 1017 - DNA, 3884 bp, Homo sapiens
  source 1..3884: mol_type = genomic DNA
  misc_feature 1..3884: note = cDNA of KCNH2 gene SNP c.889C>T (p.Pro297Ser)
atgccggtgcggaggggccacgtcgcgccgcagaacaccttcctggacaccatcatccgcaagtttgagggccagagccgtaagttcatcatcgccaacgctcgggtggagaactgcgccgtcatctactgcaacgacggcttctgcgagctgtgcggctactcgcgggccgaggtgatgcagcgaccctgcacctgcgacttcctgcacgggccgcgcacgcagcgccgcgctgccgcgcagatcgcgcaggcactgctgggcgccgaggagcgcaaagtggaaatcgccttctaccggaaagatgggagctgcttcctatgtctggtggatgtggtgcccgtgaagaacgaggatggggctgtcatcatgttcatcctcaatttcgaggtggtgatggagaaggacatggtggggtccccggctcatgacaccaaccaccggggcccccccaccagctggctggccccaggccgcgccaagaccttccgcctgaagctgcccgcgctgctggcgctgacggcccgggagtcgtcggtgcggtcgggcggcgcgggcggcgcgggcgccccgggggccgtggtggtggacgtggacctgacgcccgcggcacccagcagcgagtcgctggccctggacgaagtgacagccatggacaaccacgtggcagggctcgggcccgcggaggagcggcgtgcgctggtgggtcccggctctccgccccgcagcgcgcccggccagctcccatcgccccgggcgcacagcctcaaccccgacgcctcgggctccagctgcagcctggcccggacgcgctcccgagaaagctgcgccagcgtgcgccgcgcctcgtcggccgacgacatcgaggccatgcgcgccggggtgctgtccccgccaccgcgccacgccagcaccggggccatgcacccactgcgcagcggcttgctcaactccacctcggactccgacctcgtgcgctaccgcaccattagcaagattccccaaatcaccctcaactttgtggacctcaagggcgaccccttcttggcttcgcccaccagtgaccgtgagatcatagcacctaagataaaggagcgaacccacaatgtcactgagaaggtcacccaggtcctgtccctgggcgccgacgtgctgcctgagtacaagctgcaggcaccgcgcatccaccgctggaccatcctgcattacagccccttcaaggccgtgtgggactggctcatcctgctgctggtcatctacacggctgtcttcacaccctactcggctgccttcctgctgaaggagacggaagaaggcccgcctgctaccgagtgtggctacgcctgccagccgctggctgtggtggacctcatcgtggacatcatgttcattgtggacatcctcatcaacttccgcaccacctacgtcaatgccaacgaggaggtggtcagccaccccggccgcatcgccgtccactacttcaagggctggttcctcatcgacatggtggccgccatccccttcgacctgctcatcttcggctctggctctgaggagctgatcgggctgctgaagactgcgcggctgctgcggctggtgcgcgtggcgcggaagctggatcgctactcagagtacggcgcggccgtgctgttcttgctcatgtgcacctttgcgctcatcgcgcactggctagcctgcatctggtacgccatcggcaacatggagcagccacacatggactcacgcatcggctggctgcacaacctgggcgaccagataggcaaaccctacaacagcagcggcctgggcggcccctccatcaaggacaagtatgtgacggcgctctacttcaccttcagcagcctcaccagtgtgggcttcggcaacgtctctcccaacaccaactcagagaagatcttctccatctgcgtcatgctcattggctccctcatgtatgctagcatcttcggcaacgtgtcggccatcatccagcggctgtactcgggcacagcccgctaccacacacagatgctgcgggtgcgggagttcatccgcttccaccagatccccaatcccctgcgccagcgcctcgaggagtacttccagcacgcctggtcctacaccaacggcatcgacatgaacgcggtgctgaagggcttccctgagtgcctgcaggctgacatctgcctgcacctgaaccgctcactgctgcagcactgcaaacccttccgaggggccaccaagggctgccttcgggccctggccatgaagttcaagaccacacatgcaccgccaggggacacactggtgcatgctggggacctgctcaccgccctgtacttcatctcccggggctccatcgagatcctgcggggcgacgtcgtcgtggccatcctggggaagaatgacatctttggggagcctctgaacctgtatgcaaggcctggcaagtcgaacggggatgtgcgggccctcacctactgtgacctacacaagatccatcgggacgacctgctggaggtgctggacatgtaccctgagttctccgaccacttctggtccagcctggagatcaccttcaacctgcgagataccaacatgatcccgggctcccccggcagtacggagttagagggtggcttcagtcggcaacgcaagcgcaagttgtccttccgcaggcgcacggacaaggacacggagcagccaggggaggtgtcggccttggggccgggccgggcgggggcagggccgagtagccggggccggccgggggggccgtggggggagagcccgtccagtggcccctccagccctgagagcagtgaggatgagggcccaggccgcagctccagccccctccgcctggtgcccttctccagccccaggccccccggagagccgccgggtggggagcccctgatggaggactgcgagaagagcagcgacacttgcaaccccctgtcaggcgccttctcaggagtgtccaacattttcagcttctggggggacagtcggggccgccagtaccaggagctccctcgatgccccgcccccacccccagcctcctcaacatccccctctccagcccgggtcggcggccccggggcgacgtggagagcaggctggatgccctccagcgccagctcaacaggctggagacccggctgagtgcagacatggccactgtcctgcagctgctacagaggcagatgacgctggtcccgcccgcctacagtgctgtgaccaccccggggcctggccccacttccacatccccgctgttgcccgtcagccccctccccaccctcaccttggactcgctttctcaggtttcccagttcatggcgtgtgaggagctgcccccgggggccccagagcttccccaagaaggccccacacgacgcctctccctaccgggccagctgggggccctcacctcccagcccctgcacagacacggctcggacccgggcagttagtggggctgcccagtgtggacacgtggctcacccagggatcaaggcgctgctgggccgctccccttggaggccctgctcaggaggccctgaccgtggaaggggagaggaactcgaaagcacagctcctcccccagcccttgggaccatcttctcctgcagtcccctgggccccagtgagaggggcaggggcagggccggcagtaggtggggcctgtggtccccccactgccctgagggcattagctggtctaactgcccggaggcacccggccctgggccttaggcacctcaaggacttttctgctatttactgctcttattgttaaggataataattaaggatcatatgaataattaatgaagatgctgatgactatgaataataaataattatcctgaggaga

SEQ ID NO: 1018 - DNA, 3884 bp, Homo sapiens
  source 1..3884: mol_type = genomic DNA
  misc_feature 1..3884: note = cDNA of KCNH2 gene SNP c.896C>T (p.Pro299Leu)
atgccggtgcggaggggccacgtcgcgccgcagaacaccttcctggacaccatcatccgcaagtttgagggccagagccgtaagttcatcatcgccaacgctcgggtggagaactgcgccgtcatctactgcaacgacggcttctgcgagctgtgcggctactcgcgggccgaggtgatgcagcgaccctgcacctgcgacttcctgcacgggccgcgcacgcagcgccgcgctgccgcgcagatcgcgcaggcactgctgggcgccgaggagcgcaaagtggaaatcgccttctaccggaaagatgggagctgcttcctatgtctggtggatgtggtgcccgtgaagaacgaggatggggctgtcatcatgttcatcctcaatttcgaggtggtgatggagaaggacatggtggggtccccggctcatgacaccaaccaccggggcccccccaccagctggctggccccaggccgcgccaagaccttccgcctgaagctgcccgcgctgctggcgctgacggcccgggagtcgtcggtgcggtcgggcggcgcgggcggcgcgggcgccccgggggccgtggtggtggacgtggacctgacgcccgcggcacccagcagcgagtcgctggccctggacgaagtgacagccatggacaaccacgtggcagggctcgggcccgcggaggagcggcgtgcgctggtgggtcccggctctccgccccgcagcgcgcccggccagctcccatcgccccgggcgcacagcctcaaccccgacgcctcgggctccagctgcagcctggcccggacgcgctcccgagaaagctgcgccagcgtgcgccgcgcctcgtcggccgacgacatcgaggccatgcgcgccggggtgctgcccccgctaccgcgccacgccagcaccggggccatgcacccactgcgcagcggcttgctcaactccacctcggactccgacctcgtgcgctaccgcaccattagcaagattccccaaatcaccctcaactttgtggacctcaagggcgaccccttcttggcttcgcccaccagtgaccgtgagatcatagcacctaagataaaggagcgaacccacaatgtcactgagaaggtcacccaggtcctgtccctgggcgccgacgtgctgcctgagtacaagctgcaggcaccgcgcatccaccgctggaccatcctgcattacagccccttcaaggccgtgtgggactggctcatcctgctgctggtcatctacacggctgtcttcacaccctactcggctgccttcctgctgaaggagacggaagaaggcccgcctgctaccgagtgtggctacgcctgccagccgctggctgtggtggacctcatcgtggacatcatgttcattgtggacatcctcatcaacttccgcaccacctacgtcaatgccaacgaggaggtggtcagccaccccggccgcatcgccgtccactacttcaagggctggttcctcatcgacatggtggccgccatccccttcgacctgctcatcttcggctctggctctgaggagctgatcgggctgctgaagactgcgcggctgctgcggctggtgcgcgtggcgcggaagctggatcgctactcagagtacggcgcggccgtgctgttcttgctcatgtgcacctttgcgctcatcgcgcactggctagcctgcatctggtacgccatcggcaacatggagcagccacacatggactcacgcatcggctggctgcacaacctgggcgaccagataggcaaaccctacaacagcagcggcctgggcggcccctccatcaaggacaagtatgtgacggcgctctacttcaccttcagcagcctcaccagtgtgggcttcggcaacgtctctcccaacaccaactcagagaagatcttctccatctgcgtcatgctcattggctccctcatgtatgctagcatcttcggcaacgtgtcggccatcatccagcggctgtactcgggcacagcccgctaccacacacagatgctgcgggtgcgggagttcatccgcttccaccagatccccaatcccctgcgccagcgcctcgaggagtacttccagcacgcctggtcctacaccaacggcatcgacatgaacgcggtgctgaagggcttccctgagtgcctgcaggctgacatctgcctgcacctgaaccgctcactgctgcagcactgcaaacccttccgaggggccaccaagggctgccttcgggccctggccatgaagttcaagaccacacatgcaccgccaggggacacactggtgcatgctggggacctgctcaccgccctgtacttcatctcccggggctccatcgagatcctgcggggcgacgtcgtcgtggccatcctggggaagaatgacatctttggggagcctctgaacctgtatgcaaggcctggcaagtcgaacggggatgtgcgggccctcacctactgtgacctacacaagatccatcgggacgacctgctggaggtgctggacatgtaccctgagttctccgaccacttctggtccagcctggagatcaccttcaacctgcgagataccaacatgatcccgggctcccccggcagtacggagttagagggtggcttcagtcggcaacgcaagcgcaagttgtccttccgcaggcgcacggacaaggacacggagcagccaggggaggtgtcggccttggggccgggccgggcgggggcagggccgagtagccggggccggccgggggggccgtggggggagagcccgtccagtggcccctccagccctgagagcagtgaggatgagggcccaggccgcagctccagccccctccgcctggtgcccttctccagccccaggccccccggagagccgccgggtggggagcccctgatggaggactgcgagaagagcagcgacacttgcaaccccctgtcaggcgccttctcaggagtgtccaacattttcagcttctggggggacagtcggggccgccagtaccaggagctccctcgatgccccgcccccacccccagcctcctcaacatccccctctccagcccgggtcggcggccccggggcgacgtggagagcaggctggatgccctccagcgccagctcaacaggctggagacccggctgagtgcagacatggccactgtcctgcagctgctacagaggcagatgacgctggtcccgcccgcctacagtgctgtgaccaccccggggcctggccccacttccacatccccgctgttgcccgtcagccccctccccaccctcaccttggactcgctttctcaggtttcccagttcatggcgtgtgaggagctgcccccgggggccccagagcttccccaagaaggccccacacgacgcctctccctaccgggccagctgggggccctcacctcccagcccctgcacagacacggctcggacccgggcagttagtggggctgcccagtgtggacacgtggctcacccagggatcaaggcgctgctgggccgctccccttggaggccctgctcaggaggccctgaccgtggaaggggagaggaactcgaaagcacagctcctcccccagcccttgggaccatcttctcctgcagtcccctgggccccagtgagaggggcaggggcagggccggcagtaggtggggcctgtggtccccccactgccctgagggcattagctggtctaactgcccggaggcacccggccctgggccttaggcacctcaaggacttttctgctatttactgctcttattgttaaggataataattaaggatcatatgaataattaatgaagatgctgatgactatgaataataaataattatcctgaggaga

SEQ ID NO: 1019 - DNA, 3884 bp, Homo sapiens
  source 1..3884: mol_type = genomic DNA
  misc_feature 1..3884: note = cDNA of KCNH2 gene SNP c.89T>C (p.Ile30Thr)
atgccggtgcggaggggccacgtcgcgccgcagaacaccttcctggacaccatcatccgcaagtttgagggccagagccgtaagttcaccatcgccaacgctcgggtggagaactgcgccgtcatctactgcaacgacggcttctgcgagctgtgcggctactcgcgggccgaggtgatgcagcgaccctgcacctgcgacttcctgcacgggccgcgcacgcagcgccgcgctgccgcgcagatcgcgcaggcactgctgggcgccgaggagcgcaaagtggaaatcgccttctaccggaaagatgggagctgcttcctatgtctggtggatgtggtgcccgtgaagaacgaggatggggctgtcatcatgttcatcctcaatttcgaggtggtgatggagaaggacatggtggggtccccggctcatgacaccaaccaccggggcccccccaccagctggctggccccaggccgcgccaagaccttccgcctgaagctgcccgcgctgctggcgctgacggcccgggagtcgtcggtgcggtcgggcggcgcgggcggcgcgggcgccccgggggccgtggtggtggacgtggacctgacgcccgcggcacccagcagcgagtcgctggccctggacgaagtgacagccatggacaaccacgtggcagggctcgggcccgcggaggagcggcgtgcgctggtgggtcccggctctccgccccgcagcgcgcccggccagctcccatcgccccgggcgcacagcctcaaccccgacgcctcgggctccagctgcagcctggcccggacgcgctcccgagaaagctgcgccagcgtgcgccgcgcctcgtcggccgacgacatcgaggccatgcgcgccggggtgctgcccccgccaccgcgccacgccagcaccggggccatgcacccactgcgcagcggcttgctcaactccacctcggactccgacctcgtgcgctaccgcaccattagcaagattccccaaatcaccctcaactttgtggacctcaagggcgaccccttcttggcttcgcccaccagtgaccgtgagatcatagcacctaagataaaggagcgaacccacaatgtcactgagaaggtcacccaggtcctgtccctgggcgccgacgtgctgcctgagtacaagctgcaggcaccgcgcatccaccgctggaccatcctgcattacagccccttcaaggccgtgtgggactggctcatcctgctgctggtcatctacacggctgtcttcacaccctactcggctgccttcctgctgaaggagacggaagaaggcccgcctgctaccgagtgtggctacgcctgccagccgctggctgtggtggacctcatcgtggacatcatgttcattgtggacatcctcatcaacttccgcaccacctacgtcaatgccaacgaggaggtggtcagccaccccggccgcatcgccgtccactacttcaagggctggttcctcatcgacatggtggccgccatccccttcgacctgctcatcttcggctctggctctgaggagctgatcgggctgctgaagactgcgcggctgctgcggctggtgcgcgtggcgcggaagctggatcgctactcagagtacggcgcggccgtgctgttcttgctcatgtgcacctttgcgctcatcgcgcactggctagcctgcatctggtacgccatcggcaacatggagcagccacacatggactcacgcatcggctggctgcacaacctgggcgaccagataggcaaaccctacaacagcagcggcctgggcggcccctccatcaaggacaagtatgtgacggcgctctacttcaccttcagcagcctcaccagtgtgggcttcggcaacgtctctcccaacaccaactcagagaagatcttctccatctgcgtcatgctcattggctccctcatgtatgctagcatcttcggcaacgtgtcggccatcatccagcggctgtactcgggcacagcccgctaccacacacagatgctgcgggtgcgggagttcatccgcttccaccagatccccaatcccctgcgccagcgcctcgaggagtacttccagcacgcctggtcctacaccaacggcatcgacatgaacgcggtgctgaagggcttccctgagtgcctgcaggctgacatctgcctgcacctgaaccgctcactgctgcagcactgcaaacccttccgaggggccaccaagggctgccttcgggccctggccatgaagttcaagaccacacatgcaccgccaggggacacactggtgcatgctggggacctgctcaccgccctgtacttcatctcccggggctccatcgagatcctgcggggcgacgtcgtcgtggccatcctggggaagaatgacatctttggggagcctctgaacctgtatgcaaggcctggcaagtcgaacggggatgtgcgggccctcacctactgtgacctacacaagatccatcgggacgacctgctggaggtgctggacatgtaccctgagttctccgaccacttctggtccagcctggagatcaccttcaacctgcgagataccaacatgatcccgggctcccccggcagtacggagttagagggtggcttcagtcggcaacgcaagcgcaagttgtccttccgcaggcgcacggacaaggacacggagcagccaggggaggtgtcggccttggggccgggccgggcgggggcagggccgagtagccggggccggccgggggggccgtggggggagagcccgtccagtggcccctccagccctgagagcagtgaggatgagggcccaggccgcagctccagccccctccgcctggtgcccttctccagccccaggccccccggagagccgccgggtggggagcccctgatggaggactgcgagaagagcagcgacacttgcaaccccctgtcaggcgccttctcaggagtgtccaacattttcagcttctggggggacagtcggggccgccagtaccaggagctccctcgatgccccgcccccacccccagcctcctcaacatccccctctccagcccgggtcggcggccccggggcgacgtggagagcaggctggatgccctccagcgccagctcaacaggctggagacccggctgagtgcagacatggccactgtcctgcagctgctacagaggcagatgacgctggtcccgcccgcctacagtgctgtgaccaccccggggcctggccccacttccacatccccgctgttgcccgtcagccccctccccaccctcaccttggactcgctttctcaggtttcccagttcatggcgtgtgaggagctgcccccgggggccccagagcttccccaagaaggccccacacgacgcctctccctaccgggccagctgggggccctcacctcccagcccctgcacagacacggctcggacccgggcagttagtggggctgcccagtgtggacacgtggctcacccagggatcaaggcgctgctgggccgctccccttggaggccctgctcaggaggccctgaccgtggaaggggagaggaactcgaaagcacagctcctcccccagcccttgggaccatcttctcctgcagtcccctgggccccagtgagaggggcaggggcagggccggcagtaggtggggcctgtggtccccccactgccctgagggcattagctggtctaactgcccggaggcacccggccctgggccttaggcacctcaaggacttttctgctatttactgctcttattgttaaggataataattaaggatcatatgaataattaatgaagatgctgatgactatgaataataaataattatcctgaggaga

SEQ ID NO: 1020 - DNA, 3884 bp, Homo sapiens
  source 1..3884: mol_type = genomic DNA
  misc_feature 1..3884: note = cDNA of KCNH2 gene SNP c.902G>T (p.Arg301Leu)
atgccggtgcggaggggccacgtcgcgccgcagaacaccttcctggacaccatcatccgcaagtttgagggccagagccgtaagttcatcatcgccaacgctcgggtggagaactgcgccgtcatctactgcaacgacggcttctgcgagctgtgcggctactcgcgggccgaggtgatgcagcgaccctgcacctgcgacttcctgcacgggccgcgcacgcagcgccgcgctgccgcgcagatcgcgcaggcactgctgggcgccgaggagcgcaaagtggaaatcgccttctaccggaaagatgggagctgcttcctatgtctggtggatgtggtgcccgtgaagaacgaggatggggctgtcatcatgttcatcctcaatttcgaggtggtgatggagaaggacatggtggggtccccggctcatgacaccaaccaccggggcccccccaccagctggctggccccaggccgcgccaagaccttccgcctgaagctgcccgcgctgctggcgctgacggcccgggagtcgtcggtgcggtcgggcggcgcgggcggcgcgggcgccccgggggccgtggtggtggacgtggacctgacgcccgcggcacccagcagcgagtcgctggccctggacgaagtgacagccatggacaaccacgtggcagggctcgggcccgcggaggagcggcgtgcgctggtgggtcccggctctccgccccgcagcgcgcccggccagctcccatcgccccgggcgcacagcctcaaccccgacgcctcgggctccagctgcagcctggcccggacgcgctcccgagaaagctgcgccagcgtgcgccgcgcctcgtcggccgacgacatcgaggccatgcgcgccggggtgctgcccccgccaccgctccacgccagcaccggggccatgcacccactgcgcagcggcttgctcaactccacctcggactccgacctcgtgcgctaccgcaccattagcaagattccccaaatcaccctcaactttgtggacctcaagggcgaccccttcttggcttcgcccaccagtgaccgtgagatcatagcacctaagataaaggagcgaacccacaatgtcactgagaaggtcacccaggtcctgtccctgggcgccgacgtgctgcctgagtacaagctgcaggcaccgcgcatccaccgctggaccatcctgcattacagccccttcaaggccgtgtgggactggctcatcctgctgctggtcatctacacggctgtcttcacaccctactcggctgccttcctgctgaaggagacggaagaaggcccgcctgctaccgagtgtggctacgcctgccagccgctggctgtggtggacctcatcgtggacatcatgttcattgtggacatcctcatcaacttccgcaccacctacgtcaatgccaacgaggaggtggtcagccaccccggccgcatcgccgtccactacttcaagggctggttcctcatcgacatggtggccgccatccccttcgacctgctcatcttcggctctggctctgaggagctgatcgggctgctgaagactgcgcggctgctgcggctggtgcgcgtggcgcggaagctggatcgctactcagagtacggcgcggccgtgctgttcttgctcatgtgcacctttgcgctcatcgcgcactggctagcctgcatctggtacgccatcggcaacatggagcagccacacatggactcacgcatcggctggctgcacaacctgggcgaccagataggcaaaccctacaacagcagcggcctgggcggcccctccatcaaggacaagtatgtgacggcgctctacttcaccttcagcagcctcaccagtgtgggcttcggcaacgtctctcccaacaccaactcagagaagatcttctccatctgcgtcatgctcattggctccctcatgtatgctagcatcttcggcaacgtgtcggccatcatccagcggctgtactcgggcacagcccgctaccacacacagatgctgcgggtgcgggagttcatccgcttccaccagatccccaatcccctgcgccagcgcctcgaggagtacttccagcacgcctggtcctacaccaacggcatcgacatgaacgcggtgctgaagggcttccctgagtgcctgcaggctgacatctgcctgcacctgaaccgctcactgctgcagcactgcaaacccttccgaggggccaccaagggctgccttcgggccctggccatgaagttcaagaccacacatgcaccgccaggggacacactggtgcatgctggggacctgctcaccgccctgtacttcatctcccggggctccatcgagatcctgcggggcgacgtcgtcgtggccatcctggggaagaatgacatctttggggagcctctgaacctgtatgcaaggcctggcaagtcgaacggggatgtgcgggccctcacctactgtgacctacacaagatccatcgggacgacctgctggaggtgctggacatgtaccctgagttctccgaccacttctggtccagcctggagatcaccttcaacctgcgagataccaacatgatcccgggctcccccggcagtacggagttagagggtggcttcagtcggcaacgcaagcgcaagttgtccttccgcaggcgcacggacaaggacacggagcagccaggggaggtgtcggccttggggccgggccgggcgggggcagggccgagtagccggggccggccgggggggccgtggggggagagcccgtccagtggcccctccagccctgagagcagtgaggatgagggcccaggccgcagctccagccccctccgcctggtgcccttctccagccccaggccccccggagagccgccgggtggggagcccctgatggaggactgcgagaagagcagcgacacttgcaaccccctgtcaggcgccttctcaggagtgtccaacattttcagcttctggggggacagtcggggccgccagtaccaggagctccctcgatgccccgcccccacccccagcctcctcaacatccccctctccagcccgggtcggcggccccggggcgacgtggagagcaggctggatgccctccagcgccagctcaacaggctggagacccggctgagtgcagacatggccactgtcctgcagctgctacagaggcagatgacgctggtcccgcccgcctacagtgctgtgaccaccccggggcctggccccacttccacatccccgctgttgcccgtcagccccctccccaccctcaccttggactcgctttctcaggtttcccagttcatggcgtgtgaggagctgcccccgggggccccagagcttccccaagaaggccccacacgacgcctctccctaccgggccagctgggggccctcacctcccagcccctgcacagacacggctcggacccgggcagttagtggggctgcccagtgtggacacgtggctcacccagggatcaaggcgctgctgggccgctccccttggaggccctgctcaggaggccctgaccgtggaaggggagaggaactcgaaagcacagctcctcccccagcccttgggaccatcttctcctgcagtcccctgggccccagtgagaggggcaggggcagggccggcagtaggtggggcctgtggtccccccactgccctgagggcattagctggtctaactgcccggaggcacccggccctgggccttaggcacctcaaggacttttctgctatttactgctcttattgttaaggataataattaaggatcatatgaataattaatgaagatgctgatgactatgaataataaataattatcctgaggaga

SEQ ID NO: 1021 - DNA, 3884 bp, Homo sapiens
  source 1..3884: mol_type = genomic DNA
  misc_feature 1..3884: note = cDNA of KCNH2 gene SNP c.908C>G (p.Ala303Gly)
atgccggtgcggaggggccacgtcgcgccgcagaacaccttcctggacaccatcatccgcaagtttgagggccagagccgtaagttcatcatcgccaacgctcgggtggagaactgcgccgtcatctactgcaacgacggcttctgcgagctgtgcggctactcgcgggccgaggtgatgcagcgaccctgcacctgcgacttcctgcacgggccgcgcacgcagcgccgcgctgccgcgcagatcgcgcaggcactgctgggcgccgaggagcgcaaagtggaaatcgccttctaccggaaagatgggagctgcttcctatgtctggtggatgtggtgcccgtgaagaacgaggatggggctgtcatcatgttcatcctcaatttcgaggtggtgatggagaaggacatggtggggtccccggctcatgacaccaaccaccggggcccccccaccagctggctggccccaggccgcgccaagaccttccgcctgaagctgcccgcgctgctggcgctgacggcccgggagtcgtcggtgcggtcgggcggcgcgggcggcgcgggcgccccgggggccgtggtggtggacgtggacctgacgcccgcggcacccagcagcgagtcgctggccctggacgaagtgacagccatggacaaccacgtggcagggctcgggcccgcggaggagcggcgtgcgctggtgggtcccggctctccgccccgcagcgcgcccggccagctcccatcgccccgggcgcacagcctcaaccccgacgcctcgggctccagctgcagcctggcccggacgcgctcccgagaaagctgcgccagcgtgcgccgcgcctcgtcggccgacgacatcgaggccatgcgcgccggggtgctgcccccgccaccgcgccacggcagcaccggggccatgcacccactgcgcagcggcttgctcaactccacctcggactccgacctcgtgcgctaccgcaccattagcaagattccccaaatcaccctcaactttgtggacctcaagggcgaccccttcttggcttcgcccaccagtgaccgtgagatcatagcacctaagataaaggagcgaacccacaatgtcactgagaaggtcacccaggtcctgtccctgggcgccgacgtgctgcctgagtacaagctgcaggcaccgcgcatccaccgctggaccatcctgcattacagccccttcaaggccgtgtgggactggctcatcctgctgctggtcatctacacggctgtcttcacaccctactcggctgccttcctgctgaaggagacggaagaaggcccgcctgctaccgagtgtggctacgcctgccagccgctggctgtggtggacctcatcgtggacatcatgttcattgtggacatcctcatcaacttccgcaccacctacgtcaatgccaacgaggaggtggtcagccaccccggccgcatcgccgtccactacttcaagggctggttcctcatcgacatggtggccgccatccccttcgacctgctcatcttcggctctggctctgaggagctgatcgggctgctgaagactgcgcggctgctgcggctggtgcgcgtggcgcggaagctggatcgctactcagagtacggcgcggccgtgctgttcttgctcatgtgcacctttgcgctcatcgcgcactggctagcctgcatctggtacgccatcggcaacatggagcagccacacatggactcacgcatcggctggctgcacaacctgggcgaccagataggcaaaccctacaacagcagcggcctgggcggcccctccatcaaggacaagtatgtgacggcgctctacttcaccttcagcagcctcaccagtgtgggcttcggcaacgtctctcccaacaccaactcagagaagatcttctccatctgcgtcatgctcattggctccctcatgtatgctagcatcttcggcaacgtgtcggccatcatccagcggctgtactcgggcacagcccgctaccacacacagatgctgcgggtgcgggagttcatccgcttccaccagatccccaatcccctgcgccagcgcctcgaggagtacttccagcacgcctggtcctacaccaacggcatcgacatgaacgcggtgctgaagggcttccctgagtgcctgcaggctgacatctgcctgcacctgaaccgctcactgctgcagcactgcaaacccttccgaggggccaccaagggctgccttcgggccctggccatgaagttcaagaccacacatgcaccgccaggggacacactggtgcatgctggggacctgctcaccgccctgtacttcatctcccggggctccatcgagatcctgcggggcgacgtcgtcgtggccatcctggggaagaatgacatctttggggagcctctgaacctgtatgcaaggcctggcaagtcgaacggggatgtgcgggccctcacctactgtgacctacacaagatccatcgggacgacctgctggaggtgctggacatgtaccctgagttctccgaccacttctggtccagcctggagatcaccttcaacctgcgagataccaacatgatcccgggctcccccggcagtacggagttagagggtggcttcagtcggcaacgcaagcgcaagttgtccttccgcaggcgcacggacaaggacacggagcagccaggggaggtgtcggccttggggccgggccgggcgggggcagggccgagtagccggggccggccgggggggccgtggggggagagcccgtccagtggcccctccagccctgagagcagtgaggatgagggcccaggccgcagctccagccccctccgcctggtgcccttctccagccccaggccccccggagagccgccgggtggggagcccctgatggaggactgcgagaagagcagcgacacttgcaaccccctgtcaggcgccttctcaggagtgtccaacattttcagcttctggggggacagtcggggccgccagtaccaggagctccctcgatgccccgcccccacccccagcctcctcaacatccccctctccagcccgggtcggcggccccggggcgacgtggagagcaggctggatgccctccagcgccagctcaacaggctggagacccggctgagtgcagacatggccactgtcctgcagctgctacagaggcagatgacgctggtcccgcccgcctacagtgctgtgaccaccccggggcctggccccacttccacatccccgctgttgcccgtcagccccctccccaccctcaccttggactcgctttctcaggtttcccagttcatggcgtgtgaggagctgcccccgggggccccagagcttccccaagaaggccccacacgacgcctctccctaccgggccagctgggggccctcacctcccagcccctgcacagacacggctcggacccgggcagttagtggggctgcccagtgtggacacgtggctcacccagggatcaaggcgctgctgggccgctccccttggaggccctgctcaggaggccctgaccgtggaaggggagaggaactcgaaagcacagctcctcccccagcccttgggaccatcttctcctgcagtcccctgggccccagtgagaggggcaggggcagggccggcagtaggtggggcctgtggtccccccactgccctgagggcattagctggtctaactgcccggaggcacccggccctgggccttaggcacctcaaggacttttctgctatttactgctcttattgttaaggataataattaaggatcatatgaataattaatgaagatgctgatgactatgaataataaataattatcctgaggaga

SEQ ID NO: 1022 - DNA, 3884 bp, Homo sapiens
  source 1..3884: mol_type = genomic DNA
  misc_feature 1..3884: note = cDNA of KCNH2 gene SNP c.916G>C (p.Gly306Arg)
atgccggtgcggaggggccacgtcgcgccgcagaacaccttcctggacaccatcatccgcaagtttgagggccagagccgtaagttcatcatcgccaacgctcgggtggagaactgcgccgtcatctactgcaacgacggcttctgcgagctgtgcggctactcgcgggccgaggtgatgcagcgaccctgcacctgcgacttcctgcacgggccgcgcacgcagcgccgcgctgccgcgcagatcgcgcaggcactgctgggcgccgaggagcgcaaagtggaaatcgccttctaccggaaagatgggagctgcttcctatgtctggtggatgtggtgcccgtgaagaacgaggatggggctgtcatcatgttcatcctcaatttcgaggtggtgatggagaaggacatggtggggtccccggctcatgacaccaaccaccggggcccccccaccagctggctggccccaggccgcgccaagaccttccgcctgaagctgcccgcgctgctggcgctgacggcccgggagtcgtcggtgcggtcgggcggcgcgggcggcgcgggcgccccgggggccgtggtggtggacgtggacctgacgcccgcggcacccagcagcgagtcgctggccctggacgaagtgacagccatggacaaccacgtggcagggctcgggcccgcggaggagcggcgtgcgctggtgggtcccggctctccgccccgcagcgcgcccggccagctcccatcgccccgggcgcacagcctcaaccccgacgcctcgggctccagctgcagcctggcccggacgcgctcccgagaaagctgcgccagcgtgcgccgcgcctcgtcggccgacgacatcgaggccatgcgcgccggggtgctgcccccgccaccgcgccacgccagcacccgggccatgcacccactgcgcagcggcttgctcaactccacctcggactccgacctcgtgcgctaccgcaccattagcaagattccccaaatcaccctcaactttgtggacctcaagggcgaccccttcttggcttcgcccaccagtgaccgtgagatcatagcacctaagataaaggagcgaacccacaatgtcactgagaaggtcacccaggtcctgtccctgggcgccgacgtgctgcctgagtacaagctgcaggcaccgcgcatccaccgctggaccatcctgcattacagccccttcaaggccgtgtgggactggctcatcctgctgctggtcatctacacggctgtcttcacaccctactcggctgccttcctgctgaaggagacggaagaaggcccgcctgctaccgagtgtggctacgcctgccagccgctggctgtggtggacctcatcgtggacatcatgttcattgtggacatcctcatcaacttccgcaccacctacgtcaatgccaacgaggaggtggtcagccaccccggccgcatcgccgtccactacttcaagggctggttcctcatcgacatggtggccgccatccccttcgacctgctcatcttcggctctggctctgaggagctgatcgggctgctgaagactgcgcggctgctgcggctggtgcgcgtggcgcggaagctggatcgctactcagagtacggcgcggccgtgctgttcttgctcatgtgcacctttgcgctcatcgcgcactggctagcctgcatctggtacgccatcggcaacatggagcagccacacatggactcacgcatcggctggctgcacaacctgggcgaccagataggcaaaccctacaacagcagcggcctgggcggcccctccatcaaggacaagtatgtgacggcgctctacttcaccttcagcagcctcaccagtgtgggcttcggcaacgtctctcccaacaccaactcagagaagatcttctccatctgcgtcatgctcattggctccctcatgtatgctagcatcttcggcaacgtgtcggccatcatccagcggctgtactcgggcacagcccgctaccacacacagatgctgcgggtgcgggagttcatccgcttccaccagatccccaatcccctgcgccagcgcctcgaggagtacttccagcacgcctggtcctacaccaacggcatcgacatgaacgcggtgctgaagggcttccctgagtgcctgcaggctgacatctgcctgcacctgaaccgctcactgctgcagcactgcaaacccttccgaggggccaccaagggctgccttcgggccctggccatgaagttcaagaccacacatgcaccgccaggggacacactggtgcatgctggggacctgctcaccgccctgtacttcatctcccggggctccatcgagatcctgcggggcgacgtcgtcgtggccatcctggggaagaatgacatctttggggagcctctgaacctgtatgcaaggcctggcaagtcgaacggggatgtgcgggccctcacctactgtgacctacacaagatccatcgggacgacctgctggaggtgctggacatgtaccctgagttctccgaccacttctggtccagcctggagatcaccttcaacctgcgagataccaacatgatcccgggctcccccggcagtacggagttagagggtggcttcagtcggcaacgcaagcgcaagttgtccttccgcaggcgcacggacaaggacacggagcagccaggggaggtgtcggccttggggccgggccgggcgggggcagggccgagtagccggggccggccgggggggccgtggggggagagcccgtccagtggcccctccagccctgagagcagtgaggatgagggcccaggccgcagctccagccccctccgcctggtgcccttctccagccccaggccccccggagagccgccgggtggggagcccctgatggaggactgcgagaagagcagcgacacttgcaaccccctgtcaggcgccttctcaggagtgtccaacattttcagcttctggggggacagtcggggccgccagtaccaggagctccctcgatgccccgcccccacccccagcctcctcaacatccccctctccagcccgggtcggcggccccggggcgacgtggagagcaggctggatgccctccagcgccagctcaacaggctggagacccggctgagtgcagacatggccactgtcctgcagctgctacagaggcagatgacgctggtcccgcccgcctacagtgctgtgaccaccccggggcctggccccacttccacatccccgctgttgcccgtcagccccctccccaccctcaccttggactcgctttctcaggtttcccagttcatggcgtgtgaggagctgcccccgggggccccagagcttccccaagaaggccccacacgacgcctctccctaccgggccagctgggggccctcacctcccagcccctgcacagacacggctcggacccgggcagttagtggggctgcccagtgtggacacgtggctcacccagggatcaaggcgctgctgggccgctccccttggaggccctgctcaggaggccctgaccgtggaaggggagaggaactcgaaagcacagctcctcccccagcccttgggaccatcttctcctgcagtcccctgggccccagtgagaggggcaggggcagggccggcagtaggtggggcctgtggtccccccactgccctgagggcattagctggtctaactgcccggaggcacccggccctgggccttaggcacctcaaggacttttctgctatttactgctcttattgttaaggataataattaaggatcatatgaataattaatgaagatgctgatgactatgaataataaataattatcctgaggaga

SEQ ID NO: 1023 - DNA, 3884 bp, Homo sapiens
  source 1..3884: mol_type = genomic DNA
  misc_feature 1..3884: note = cDNA of KCNH2 gene SNP c.916G>T (p.Gly306Trp)
atgccggtgcggaggggccacgtcgcgccgcagaacaccttcctggacaccatcatccgcaagtttgagggccagagccgtaagttcatcatcgccaacgctcgggtggagaactgcgccgtcatctactgcaacgacggcttctgcgagctgtgcggctactcgcgggccgaggtgatgcagcgaccctgcacctgcgacttcctgcacgggccgcgcacgcagcgccgcgctgccgcgcagatcgcgcaggcactgctgggcgccgaggagcgcaaagtggaaatcgccttctaccggaaagatgggagctgcttcctatgtctggtggatgtggtgcccgtgaagaacgaggatggggctgtcatcatgttcatcctcaatttcgaggtggtgatggagaaggacatggtggggtccccggctcatgacaccaaccaccggggcccccccaccagctggctggccccaggccgcgccaagaccttccgcctgaagctgcccgcgctgctggcgctgacggcccgggagtcgtcggtgcggtcgggcggcgcgggcggcgcgggcgccccgggggccgtggtggtggacgtggacctgacgcccgcggcacccagcagcgagtcgctggccctggacgaagtgacagccatggacaaccacgtggcagggctcgggcccgcggaggagcggcgtgcgctggtgggtcccggctctccgccccgcagcgcgcccggccagctcccatcgccccgggcgcacagcctcaaccccgacgcctcgggctccagctgcagcctggcccggacgcgctcccgagaaagctgcgccagcgtgcgccgcgcctcgtcggccgacgacatcgaggccatgcgcgccggggtgctgcccccgccaccgcgccacgccagcacctgggccatgcacccactgcgcagcggcttgctcaactccacctcggactccgacctcgtgcgctaccgcaccattagcaagattccccaaatcaccctcaactttgtggacctcaagggcgaccccttcttggcttcgcccaccagtgaccgtgagatcatagcacctaagataaaggagcgaacccacaatgtcactgagaaggtcacccaggtcctgtccctgggcgccgacgtgctgcctgagtacaagctgcaggcaccgcgcatccaccgctggaccatcctgcattacagccccttcaaggccgtgtgggactggctcatcctgctgctggtcatctacacggctgtcttcacaccctactcggctgccttcctgctgaaggagacggaagaaggcccgcctgctaccgagtgtggctacgcctgccagccgctggctgtggtggacctcatcgtggacatcatgttcattgtggacatcctcatcaacttccgcaccacctacgtcaatgccaacgaggaggtggtcagccaccccggccgcatcgccgtccactacttcaagggctggttcctcatcgacatggtggccgccatccccttcgacctgctcatcttcggctctggctctgaggagctgatcgggctgctgaagactgcgcggctgctgcggctggtgcgcgtggcgcggaagctggatcgctactcagagtacggcgcggccgtgctgttcttgctcatgtgcacctttgcgctcatcgcgcactggctagcctgcatctggtacgccatcggcaacatggagcagccacacatggactcacgcatcggctggctgcacaacctgggcgaccagataggcaaaccctacaacagcagcggcctgggcggcccctccatcaaggacaagtatgtgacggcgctctacttcaccttcagcagcctcaccagtgtgggcttcggcaacgtctctcccaacaccaactcagagaagatcttctccatctgcgtcatgctcattggctccctcatgtatgctagcatcttcggcaacgtgtcggccatcatccagcggctgtactcgggcacagcccgctaccacacacagatgctgcgggtgcgggagttcatccgcttccaccagatccccaatcccctgcgccagcgcctcgaggagtacttccagcacgcctggtcctacaccaacggcatcgacatgaacgcggtgctgaagggcttccctgagtgcctgcaggctgacatctgcctgcacctgaaccgctcactgctgcagcactgcaaacccttccgaggggccaccaagggctgccttcgggccctggccatgaagttcaagaccacacatgcaccgccaggggacacactggtgcatgctggggacctgctcaccgccctgtacttcatctcccggggctccatcgagatcctgcggggcgacgtcgtcgtggccatcctggggaagaatgacatctttggggagcctctgaacctgtatgcaaggcctggcaagtcgaacggggatgtgcgggccctcacctactgtgacctacacaagatccatcgggacgacctgctggaggtgctggacatgtaccctgagttctccgaccacttctggtccagcctggagatcaccttcaacctgcgagataccaacatgatcccgggctcccccggcagtacggagttagagggtggcttcagtcggcaacgcaagcgcaagttgtccttccgcaggcgcacggacaaggacacggagcagccaggggaggtgtcggccttggggccgggccgggcgggggcagggccgagtagccggggccggccgggggggccgtggggggagagcccgtccagtggcccctccagccctgagagcagtgaggatgagggcccaggccgcagctccagccccctccgcctggtgcccttctccagccccaggccccccggagagccgccgggtggggagcccctgatggaggactgcgagaagagcagcgacacttgcaaccccctgtcaggcgccttctcaggagtgtccaacattttcagcttctggggggacagtcggggccgccagtaccaggagctccctcgatgccccgcccccacccccagcctcctcaacatccccctctccagcccgggtcggcggccccggggcgacgtggagagcaggctggatgccctccagcgccagctcaacaggctggagacccggctgagtgcagacatggccactgtcctgcagctgctacagaggcagatgacgctggtcccgcccgcctacagtgctgtgaccaccccggggcctggccccacttccacatccccgctgttgcccgtcagccccctccccaccctcaccttggactcgctttctcaggtttcccagttcatggcgtgtgaggagctgcccccgggggccccagagcttccccaagaaggccccacacgacgcctctccctaccgggccagctgggggccctcacctcccagcccctgcacagacacggctcggacccgggcagttagtggggctgcccagtgtggacacgtggctcacccagggatcaaggcgctgctgggccgctccccttggaggccctgctcaggaggccctgaccgtggaaggggagaggaactcgaaagcacagctcctcccccagcccttgggaccatcttctcctgcagtcccctgggccccagtgagaggggcaggggcagggccggcagtaggtggggcctgtggtccccccactgccctgagggcattagctggtctaactgcccggaggcacccggccctgggccttaggcacctcaaggacttttctgctatttactgctcttattgttaaggataataattaaggatcatatgaataattaatgaagatgctgatgactatgaataataaataattatcctgaggaga

SEQ ID NO: 1024 - DNA, 3884 bp, Homo sapiens
  source 1..3884: mol_type = genomic DNA
  misc_feature 1..3884: note = cDNA of KCNH2 gene SNP c.923T>G (p.Met308Arg)
atgccggtgcggaggggccacgtcgcgccgcagaacaccttcctggacaccatcatccgcaagtttgagggccagagccgtaagttcatcatcgccaacgctcgggtggagaactgcgccgtcatctactgcaacgacggcttctgcgagctgtgcggctactcgcgggccgaggtgatgcagcgaccctgcacctgcgacttcctgcacgggccgcgcacgcagcgccgcgctgccgcgcagatcgcgcaggcactgctgggcgccgaggagcgcaaagtggaaatcgccttctaccggaaagatgggagctgcttcctatgtctggtggatgtggtgcccgtgaagaacgaggatggggctgtcatcatgttcatcctcaatttcgaggtggtgatggagaaggacatggtggggtccccggctcatgacaccaaccaccggggcccccccaccagctggctggccccaggccgcgccaagaccttccgcctgaagctgcccgcgctgctggcgctgacggcccgggagtcgtcggtgcggtcgggcggcgcgggcggcgcgggcgccccgggggccgtggtggtggacgtggacctgacgcccgcggcacccagcagcgagtcgctggccctggacgaagtgacagccatggacaaccacgtggcagggctcgggcccgcggaggagcggcgtgcgctggtgggtcccggctctccgccccgcagcgcgcccggccagctcccatcgccccgggcgcacagcctcaaccccgacgcctcgggctccagctgcagcctggcccggacgcgctcccgagaaagctgcgccagcgtgcgccgcgcctcgtcggccgacgacatcgaggccatgcgcgccggggtgctgcccccgccaccgcgccacgccagcaccggggccaggcacccactgcgcagcggcttgctcaactccacctcggactccgacctcgtgcgctaccgcaccattagcaagattccccaaatcaccctcaactttgtggacctcaagggcgaccccttcttggcttcgcccaccagtgaccgtgagatcatagcacctaagataaaggagcgaacccacaatgtcactgagaaggtcacccaggtcctgtccctgggcgccgacgtgctgcctgagtacaagctgcaggcaccgcgcatccaccgctggaccatcctgcattacagccccttcaaggccgtgtgggactggctcatcctgctgctggtcatctacacggctgtcttcacaccctactcggctgccttcctgctgaaggagacggaagaaggcccgcctgctaccgagtgtggctacgcctgccagccgctggctgtggtggacctcatcgtggacatcatgttcattgtggacatcctcatcaacttccgcaccacctacgtcaatgccaacgaggaggtggtcagccaccccggccgcatcgccgtccactacttcaagggctggttcctcatcgacatggtggccgccatccccttcgacctgctcatcttcggctctggctctgaggagctgatcgggctgctgaagactgcgcggctgctgcggctggtgcgcgtggcgcggaagctggatcgctactcagagtacggcgcggccgtgctgttcttgctcatgtgcacctttgcgctcatcgcgcactggctagcctgcatctggtacgccatcggcaacatggagcagccacacatggactcacgcatcggctggctgcacaacctgggcgaccagataggcaaaccctacaacagcagcggcctgggcggcccctccatcaaggacaagtatgtgacggcgctctacttcaccttcagcagcctcaccagtgtgggcttcggcaacgtctctcccaacaccaactcagagaagatcttctccatctgcgtcatgctcattggctccctcatgtatgctagcatcttcggcaacgtgtcggccatcatccagcggctgtactcgggcacagcccgctaccacacacagatgctgcgggtgcgggagttcatccgcttccaccagatccccaatcccctgcgccagcgcctcgaggagtacttccagcacgcctggtcctacaccaacggcatcgacatgaacgcggtgctgaagggcttccctgagtgcctgcaggctgacatctgcctgcacctgaaccgctcactgctgcagcactgcaaacccttccgaggggccaccaagggctgccttcgggccctggccatgaagttcaagaccacacatgcaccgccaggggacacactggtgcatgctggggacctgctcaccgccctgtacttcatctcccggggctccatcgagatcctgcggggcgacgtcgtcgtggccatcctggggaagaatgacatctttggggagcctctgaacctgtatgcaaggcctggcaagtcgaacggggatgtgcgggccctcacctactgtgacctacacaagatccatcgggacgacctgctggaggtgctggacatgtaccctgagttctccgaccacttctggtccagcctggagatcaccttcaacctgcgagataccaacatgatcccgggctcccccggcagtacggagttagagggtggcttcagtcggcaacgcaagcgcaagttgtccttccgcaggcgcacggacaaggacacggagcagccaggggaggtgtcggccttggggccgggccgggcgggggcagggccgagtagccggggccggccgggggggccgtggggggagagcccgtccagtggcccctccagccctgagagcagtgaggatgagggcccaggccgcagctccagccccctccgcctggtgcccttctccagccccaggccccccggagagccgccgggtggggagcccctgatggaggactgcgagaagagcagcgacacttgcaaccccctgtcaggcgccttctcaggagtgtccaacattttcagcttctggggggacagtcggggccgccagtaccaggagctccctcgatgccccgcccccacccccagcctcctcaacatccccctctccagcccgggtcggcggccccggggcgacgtggagagcaggctggatgccctccagcgccagctcaacaggctggagacccggctgagtgcagacatggccactgtcctgcagctgctacagaggcagatgacgctggtcccgcccgcctacagtgctgtgaccaccccggggcctggccccacttccacatccccgctgttgcccgtcagccccctccccaccctcaccttggactcgctttctcaggtttcccagttcatggcgtgtgaggagctgcccccgggggccccagagcttccccaagaaggccccacacgacgcctctccctaccgggccagctgggggccctcacctcccagcccctgcacagacacggctcggacccgggcagttagtggggctgcccagtgtggacacgtggctcacccagggatcaaggcgctgctgggccgctccccttggaggccctgctcaggaggccctgaccgtggaaggggagaggaactcgaaagcacagctcctcccccagcccttgggaccatcttctcctgcagtcccctgggccccagtgagaggggcaggggcagggccggcagtaggtggggcctgtggtccccccactgccctgagggcattagctggtctaactgcccggaggcacccggccctgggccttaggcacctcaaggacttttctgctatttactgctcttattgttaaggataataattaaggatcatatgaataattaatgaagatgctgatgactatgaataataaataattatcctgaggaga

SEQ ID NO: 1025 - DNA, 3884 bp, Homo sapiens
  source 1..3884: mol_type = genomic DNA
  misc_feature 1..3884: note = cDNA of KCNH2 gene SNP c.925C>T (p.His309Tyr)
atgccggtgcggaggggccacgtcgcgccgcagaacaccttcctggacaccatcatccgcaagtttgagggccagagccgtaagttcatcatcgccaacgctcgggtggagaactgcgccgtcatctactgcaacgacggcttctgcgagctgtgcggctactcgcgggccgaggtgatgcagcgaccctgcacctgcgacttcctgcacgggccgcgcacgcagcgccgcgctgccgcgcagatcgcgcaggcactgctgggcgccgaggagcgcaaagtggaaatcgccttctaccggaaagatgggagctgcttcctatgtctggtggatgtggtgcccgtgaagaacgaggatggggctgtcatcatgttcatcctcaatttcgaggtggtgatggagaaggacatggtggggtccccggctcatgacaccaaccaccggggcccccccaccagctggctggccccaggccgcgccaagaccttccgcctgaagctgcccgcgctgctggcgctgacggcccgggagtcgtcggtgcggtcgggcggcgcgggcggcgcgggcgccccgggggccgtggtggtggacgtggacctgacgcccgcggcacccagcagcgagtcgctggccctggacgaagtgacagccatggacaaccacgtggcagggctcgggcccgcggaggagcggcgtgcgctggtgggtcccggctctccgccccgcagcgcgcccggccagctcccatcgccccgggcgcacagcctcaaccccgacgcctcgggctccagctgcagcctggcccggacgcgctcccgagaaagctgcgccagcgtgcgccgcgcctcgtcggccgacgacatcgaggccatgcgcgccggggtgctgcccccgccaccgcgccacgccagcaccggggccatgtacccactgcgcagcggcttgctcaactccacctcggactccgacctcgtgcgctaccgcaccattagcaagattccccaaatcaccctcaactttgtggacctcaagggcgaccccttcttggcttcgcccaccagtgaccgtgagatcatagcacctaagataaaggagcgaacccacaatgtcactgagaaggtcacccaggtcctgtccctgggcgccgacgtgctgcctgagtacaagctgcaggcaccgcgcatccaccgctggaccatcctgcattacagccccttcaaggccgtgtgggactggctcatcctgctgctggtcatctacacggctgtcttcacaccctactcggctgccttcctgctgaaggagacggaagaaggcccgcctgctaccgagtgtggctacgcctgccagccgctggctgtggtggacctcatcgtggacatcatgttcattgtggacatcctcatcaacttccgcaccacctacgtcaatgccaacgaggaggtggtcagccaccccggccgcatcgccgtccactacttcaagggctggttcctcatcgacatggtggccgccatccccttcgacctgctcatcttcggctctggctctgaggagctgatcgggctgctgaagactgcgcggctgctgcggctggtgcgcgtggcgcggaagctggatcgctactcagagtacggcgcggccgtgctgttcttgctcatgtgcacctttgcgctcatcgcgcactggctagcctgcatctggtacgccatcggcaacatggagcagccacacatggactcacgcatcggctggctgcacaacctgggcgaccagataggcaaaccctacaacagcagcggcctgggcggcccctccatcaaggacaagtatgtgacggcgctctacttcaccttcagcagcctcaccagtgtgggcttcggcaacgtctctcccaacaccaactcagagaagatcttctccatctgcgtcatgctcattggctccctcatgtatgctagcatcttcggcaacgtgtcggccatcatccagcggctgtactcgggcacagcccgctaccacacacagatgctgcgggtgcgggagttcatccgcttccaccagatccccaatcccctgcgccagcgcctcgaggagtacttccagcacgcctggtcctacaccaacggcatcgacatgaacgcggtgctgaagggcttccctgagtgcctgcaggctgacatctgcctgcacctgaaccgctcactgctgcagcactgcaaacccttccgaggggccaccaagggctgccttcgggccctggccatgaagttcaagaccacacatgcaccgccaggggacacactggtgcatgctggggacctgctcaccgccctgtacttcatctcccggggctccatcgagatcctgcggggcgacgtcgtcgtggccatcctggggaagaatgacatctttggggagcctctgaacctgtatgcaaggcctggcaagtcgaacggggatgtgcgggccctcacctactgtgacctacacaagatccatcgggacgacctgctggaggtgctggacatgtaccctgagttctccgaccacttctggtccagcctggagatcaccttcaacctgcgagataccaacatgatcccgggctcccccggcagtacggagttagagggtggcttcagtcggcaacgcaagcgcaagttgtccttccgcaggcgcacggacaaggacacggagcagccaggggaggtgtcggccttggggccgggccgggcgggggcagggccgagtagccggggccggccgggggggccgtggggggagagcccgtccagtggcccctccagccctgagagcagtgaggatgagggcccaggccgcagctccagccccctccgcctggtgcccttctccagccccaggccccccggagagccgccgggtggggagcccctgatggaggactgcgagaagagcagcgacacttgcaaccccctgtcaggcgccttctcaggagtgtccaacattttcagcttctggggggacagtcggggccgccagtaccaggagctccctcgatgccccgcccccacccccagcctcctcaacatccccctctccagcccgggtcggcggccccggggcgacgtggagagcaggctggatgccctccagcgccagctcaacaggctggagacccggctgagtgcagacatggccactgtcctgcagctgctacagaggcagatgacgctggtcccgcccgcctacagtgctgtgaccaccccggggcctggccccacttccacatccccgctgttgcccgtcagccccctccccaccctcaccttggactcgctttctcaggtttcccagttcatggcgtgtgaggagctgcccccgggggccccagagcttccccaagaaggccccacacgacgcctctccctaccgggccagctgggggccctcacctcccagcccctgcacagacacggctcggacccgggcagttagtggggctgcccagtgtggacacgtggctcacccagggatcaaggcgctgctgggccgctccccttggaggccctgctcaggaggccctgaccgtggaaggggagaggaactcgaaagcacagctcctcccccagcccttgggaccatcttctcctgcagtcccctgggccccagtgagaggggcaggggcagggccggcagtaggtggggcctgtggtccccccactgccctgagggcattagctggtctaactgcccggaggcacccggccctgggccttaggcacctcaaggacttttctgctatttactgctcttattgttaaggataataattaaggatcatatgaataattaatgaagatgctgatgactatgaataataaataattatcctgaggaga

SEQ ID NO: 1026 - DNA, 3884 bp, Homo sapiens
  source 1..3884: mol_type = genomic DNA
  misc_feature 1..3884: note = cDNA of KCNH2 gene SNP c.927C>G (p.His309Gln)
atgccggtgcggaggggccacgtcgcgccgcagaacaccttcctggacaccatcatccgcaagtttgagggccagagccgtaagttcatcatcgccaacgctcgggtggagaactgcgccgtcatctactgcaacgacggcttctgcgagctgtgcggctactcgcgggccgaggtgatgcagcgaccctgcacctgcgacttcctgcacgggccgcgcacgcagcgccgcgctgccgcgcagatcgcgcaggcactgctgggcgccgaggagcgcaaagtggaaatcgccttctaccggaaagatgggagctgcttcctatgtctggtggatgtggtgcccgtgaagaacgaggatggggctgtcatcatgttcatcctcaatttcgaggtggtgatggagaaggacatggtggggtccccggctcatgacaccaaccaccggggcccccccaccagctggctggccccaggccgcgccaagaccttccgcctgaagctgcccgcgctgctggcgctgacggcccgggagtcgtcggtgcggtcgggcggcgcgggcggcgcgggcgccccgggggccgtggtggtggacgtggacctgacgcccgcggcacccagcagcgagtcgctggccctggacgaagtgacagccatggacaaccacgtggcagggctcgggcccgcggaggagcggcgtgcgctggtgggtcccggctctccgccccgcagcgcgcccggccagctcccatcgccccgggcgcacagcctcaaccccgacgcctcgggctccagctgcagcctggcccggacgcgctcccgagaaagctgcgccagcgtgcgccgcgcctcgtcggccgacgacatcgaggccatgcgcgccggggtgctgcccccgccaccgcgccacgccagcaccggggccatgcagccactgcgcagcggcttgctcaactccacctcggactccgacctcgtgcgctaccgcaccattagcaagattccccaaatcaccctcaactttgtggacctcaagggcgaccccttcttggcttcgcccaccagtgaccgtgagatcatagcacctaagataaaggagcgaacccacaatgtcactgagaaggtcacccaggtcctgtccctgggcgccgacgtgctgcctgagtacaagctgcaggcaccgcgcatccaccgctggaccatcctgcattacagccccttcaaggccgtgtgggactggctcatcctgctgctggtcatctacacggctgtcttcacaccctactcggctgccttcctgctgaaggagacggaagaaggcccgcctgctaccgagtgtggctacgcctgccagccgctggctgtggtggacctcatcgtggacatcatgttcattgtggacatcctcatcaacttccgcaccacctacgtcaatgccaacgaggaggtggtcagccaccccggccgcatcgccgtccactacttcaagggctggttcctcatcgacatggtggccgccatccccttcgacctgctcatcttcggctctggctctgaggagctgatcgggctgctgaagactgcgcggctgctgcggctggtgcgcgtggcgcggaagctggatcgctactcagagtacggcgcggccgtgctgttcttgctcatgtgcacctttgcgctcatcgcgcactggctagcctgcatctggtacgccatcggcaacatggagcagccacacatggactcacgcatcggctggctgcacaacctgggcgaccagataggcaaaccctacaacagcagcggcctgggcggcccctccatcaaggacaagtatgtgacggcgctctacttcaccttcagcagcctcaccagtgtgggcttcggcaacgtctctcccaacaccaactcagagaagatcttctccatctgcgtcatgctcattggctccctcatgtatgctagcatcttcggcaacgtgtcggccatcatccagcggctgtactcgggcacagcccgctaccacacacagatgctgcgggtgcgggagttcatccgcttccaccagatccccaatcccctgcgccagcgcctcgaggagtacttccagcacgcctggtcctacaccaacggcatcgacatgaacgcggtgctgaagggcttccctgagtgcctgcaggctgacatctgcctgcacctgaaccgctcactgctgcagcactgcaaacccttccgaggggccaccaagggctgccttcgggccctggccatgaagttcaagaccacacatgcaccgccaggggacacactggtgcatgctggggacctgctcaccgccctgtacttcatctcccggggctccatcgagatcctgcggggcgacgtcgtcgtggccatcctggggaagaatgacatctttggggagcctctgaacctgtatgcaaggcctggcaagtcgaacggggatgtgcgggccctcacctactgtgacctacacaagatccatcgggacgacctgctggaggtgctggacatgtaccctgagttctccgaccacttctggtccagcctggagatcaccttcaacctgcgagataccaacatgatcccgggctcccccggcagtacggagttagagggtggcttcagtcggcaacgcaagcgcaagttgtccttccgcaggcgcacggacaaggacacggagcagccaggggaggtgtcggccttggggccgggccgggcgggggcagggccgagtagccggggccggccgggggggccgtggggggagagcccgtccagtggcccctccagccctgagagcagtgaggatgagggcccaggccgcagctccagccccctccgcctggtgcccttctccagccccaggccccccggagagccgccgggtggggagcccctgatggaggactgcgagaagagcagcgacacttgcaaccccctgtcaggcgccttctcaggagtgtccaacattttcagcttctggggggacagtcggggccgccagtaccaggagctccctcgatgccccgcccccacccccagcctcctcaacatccccctctccagcccgggtcggcggccccggggcgacgtggagagcaggctggatgccctccagcgccagctcaacaggctggagacccggctgagtgcagacatggccactgtcctgcagctgctacagaggcagatgacgctggtcccgcccgcctacagtgctgtgaccaccccggggcctggccccacttccacatccccgctgttgcccgtcagccccctccccaccctcaccttggactcgctttctcaggtttcccagttcatggcgtgtgaggagctgcccccgggggccccagagcttccccaagaaggccccacacgacgcctctccctaccgggccagctgggggccctcacctcccagcccctgcacagacacggctcggacccgggcagttagtggggctgcccagtgtggacacgtggctcacccagggatcaaggcgctgctgggccgctccccttggaggccctgctcaggaggccctgaccgtggaaggggagaggaactcgaaagcacagctcctcccccagcccttgggaccatcttctcctgcagtcccctgggccccagtgagaggggcaggggcagggccggcagtaggtggggcctgtggtccccccactgccctgagggcattagctggtctaactgcccggaggcacccggccctgggccttaggcacctcaaggacttttctgctatttactgctcttattgttaaggataataattaaggatcatatgaataattaatgaagatgctgatgactatgaataataaataattatcctgaggaga

SEQ ID NO: 1027 - DNA, 3884 bp, Homo sapiens
  source 1..3884: mol_type = genomic DNA
  misc_feature 1..3884: note = cDNA of KCNH2 gene SNP c.928C>A (p.Pro310Thr)
atgccggtgcggaggggccacgtcgcgccgcagaacaccttcctggacaccatcatccgcaagtttgagggccagagccgtaagttcatcatcgccaacgctcgggtggagaactgcgccgtcatctactgcaacgacggcttctgcgagctgtgcggctactcgcgggccgaggtgatgcagcgaccctgcacctgcgacttcctgcacgggccgcgcacgcagcgccgcgctgccgcgcagatcgcgcaggcactgctgggcgccgaggagcgcaaagtggaaatcgccttctaccggaaagatgggagctgcttcctatgtctggtggatgtggtgcccgtgaagaacgaggatggggctgtcatcatgttcatcctcaatttcgaggtggtgatggagaaggacatggtggggtccccggctcatgacaccaaccaccggggcccccccaccagctggctggccccaggccgcgccaagaccttccgcctgaagctgcccgcgctgctggcgctgacggcccgggagtcgtcggtgcggtcgggcggcgcgggcggcgcgggcgccccgggggccgtggtggtggacgtggacctgacgcccgcggcacccagcagcgagtcgctggccctggacgaagtgacagccatggacaaccacgtggcagggctcgggcccgcggaggagcggcgtgcgctggtgggtcccggctctccgccccgcagcgcgcccggccagctcccatcgccccgggcgcacagcctcaaccccgacgcctcgggctccagctgcagcctggcccggacgcgctcccgagaaagctgcgccagcgtgcgccgcgcctcgtcggccgacgacatcgaggccatgcgcgccggggtgctgcccccgccaccgcgccacgccagcaccggggccatgcacacactgcgcagcggcttgctcaactccacctcggactccgacctcgtgcgctaccgcaccattagcaagattccccaaatcaccctcaactttgtggacctcaagggcgaccccttcttggcttcgcccaccagtgaccgtgagatcatagcacctaagataaaggagcgaacccacaatgtcactgagaaggtcacccaggtcctgtccctgggcgccgacgtgctgcctgagtacaagctgcaggcaccgcgcatccaccgctggaccatcctgcattacagccccttcaaggccgtgtgggactggctcatcctgctgctggtcatctacacggctgtcttcacaccctactcggctgccttcctgctgaaggagacggaagaaggcccgcctgctaccgagtgtggctacgcctgccagccgctggctgtggtggacctcatcgtggacatcatgttcattgtggacatcctcatcaacttccgcaccacctacgtcaatgccaacgaggaggtggtcagccaccccggccgcatcgccgtccactacttcaagggctggttcctcatcgacatggtggccgccatccccttcgacctgctcatcttcggctctggctctgaggagctgatcgggctgctgaagactgcgcggctgctgcggctggtgcgcgtggcgcggaagctggatcgctactcagagtacggcgcggccgtgctgttcttgctcatgtgcacctttgcgctcatcgcgcactggctagcctgcatctggtacgccatcggcaacatggagcagccacacatggactcacgcatcggctggctgcacaacctgggcgaccagataggcaaaccctacaacagcagcggcctgggcggcccctccatcaaggacaagtatgtgacggcgctctacttcaccttcagcagcctcaccagtgtgggcttcggcaacgtctctcccaacaccaactcagagaagatcttctccatctgcgtcatgctcattggctccctcatgtatgctagcatcttcggcaacgtgtcggccatcatccagcggctgtactcgggcacagcccgctaccacacacagatgctgcgggtgcgggagttcatccgcttccaccagatccccaatcccctgcgccagcgcctcgaggagtacttccagcacgcctggtcctacaccaacggcatcgacatgaacgcggtgctgaagggcttccctgagtgcctgcaggctgacatctgcctgcacctgaaccgctcactgctgcagcactgcaaacccttccgaggggccaccaagggctgccttcgggccctggccatgaagttcaagaccacacatgcaccgccaggggacacactggtgcatgctggggacctgctcaccgccctgtacttcatctcccggggctccatcgagatcctgcggggcgacgtcgtcgtggccatcctggggaagaatgacatctttggggagcctctgaacctgtatgcaaggcctggcaagtcgaacggggatgtgcgggccctcacctactgtgacctacacaagatccatcgggacgacctgctggaggtgctggacatgtaccctgagttctccgaccacttctggtccagcctggagatcaccttcaacctgcgagataccaacatgatcccgggctcccccggcagtacggagttagagggtggcttcagtcggcaacgcaagcgcaagttgtccttccgcaggcgcacggacaaggacacggagcagccaggggaggtgtcggccttggggccgggccgggcgggggcagggccgagtagccggggccggccgggggggccgtggggggagagcccgtccagtggcccctccagccctgagagcagtgaggatgagggcccaggccgcagctccagccccctccgcctggtgcccttctccagccccaggccccccggagagccgccgggtggggagcccctgatggaggactgcgagaagagcagcgacacttgcaaccccctgtcaggcgccttctcaggagtgtccaacattttcagcttctggggggacagtcggggccgccagtaccaggagctccctcgatgccccgcccccacccccagcctcctcaacatccccctctccagcccgggtcggcggccccggggcgacgtggagagcaggctggatgccctccagcgccagctcaacaggctggagacccggctgagtgcagacatggccactgtcctgcagctgctacagaggcagatgacgctggtcccgcccgcctacagtgctgtgaccaccccggggcctggccccacttccacatccccgctgttgcccgtcagccccctccccaccctcaccttggactcgctttctcaggtttcccagttcatggcgtgtgaggagctgcccccgggggccccagagcttccccaagaaggccccacacgacgcctctccctaccgggccagctgggggccctcacctcccagcccctgcacagacacggctcggacccgggcagttagtggggctgcccagtgtggacacgtggctcacccagggatcaaggcgctgctgggccgctccccttggaggccctgctcaggaggccctgaccgtggaaggggagaggaactcgaaagcacagctcctcccccagcccttgggaccatcttctcctgcagtcccctgggccccagtgagaggggcaggggcagggccggcagtaggtggggcctgtggtccccccactgccctgagggcattagctggtctaactgcccggaggcacccggccctgggccttaggcacctcaaggacttttctgctatttactgctcttattgttaaggataataattaaggatcatatgaataattaatgaagatgctgatgactatgaataataaataattatcctgaggaga

SEQ ID NO: 1028 - DNA, 3884 bp, Homo sapiens
  source 1..3884: mol_type = genomic DNA
  misc_feature 1..3884: note = cDNA of KCNH2 gene SNP c.92T>A (p.Ile31Asn)
atgccggtgcggaggggccacgtcgcgccgcagaacaccttcctggacaccatcatccgcaagtttgagggccagagccgtaagttcatcaacgccaacgctcgggtggagaactgcgccgtcatctactgcaacgacggcttctgcgagctgtgcggctactcgcgggccgaggtgatgcagcgaccctgcacctgcgacttcctgcacgggccgcgcacgcagcgccgcgctgccgcgcagatcgcgcaggcactgctgggcgccgaggagcgcaaagtggaaatcgccttctaccggaaagatgggagctgcttcctatgtctggtggatgtggtgcccgtgaagaacgaggatggggctgtcatcatgttcatcctcaatttcgaggtggtgatggagaaggacatggtggggtccccggctcatgacaccaaccaccggggcccccccaccagctggctggccccaggccgcgccaagaccttccgcctgaagctgcccgcgctgctggcgctgacggcccgggagtcgtcggtgcggtcgggcggcgcgggcggcgcgggcgccccgggggccgtggtggtggacgtggacctgacgcccgcggcacccagcagcgagtcgctggccctggacgaagtgacagccatggacaaccacgtggcagggctcgggcccgcggaggagcggcgtgcgctggtgggtcccggctctccgccccgcagcgcgcccggccagctcccatcgccccgggcgcacagcctcaaccccgacgcctcgggctccagctgcagcctggcccggacgcgctcccgagaaagctgcgccagcgtgcgccgcgcctcgtcggccgacgacatcgaggccatgcgcgccggggtgctgcccccgccaccgcgccacgccagcaccggggccatgcacccactgcgcagcggcttgctcaactccacctcggactccgacctcgtgcgctaccgcaccattagcaagattccccaaatcaccctcaactttgtggacctcaagggcgaccccttcttggcttcgcccaccagtgaccgtgagatcatagcacctaagataaaggagcgaacccacaatgtcactgagaaggtcacccaggtcctgtccctgggcgccgacgtgctgcctgagtacaagctgcaggcaccgcgcatccaccgctggaccatcctgcattacagccccttcaaggccgtgtgggactggctcatcctgctgctggtcatctacacggctgtcttcacaccctactcggctgccttcctgctgaaggagacggaagaaggcccgcctgctaccgagtgtggctacgcctgccagccgctggctgtggtggacctcatcgtggacatcatgttcattgtggacatcctcatcaacttccgcaccacctacgtcaatgccaacgaggaggtggtcagccaccccggccgcatcgccgtccactacttcaagggctggttcctcatcgacatggtggccgccatccccttcgacctgctcatcttcggctctggctctgaggagctgatcgggctgctgaagactgcgcggctgctgcggctggtgcgcgtggcgcggaagctggatcgctactcagagtacggcgcggccgtgctgttcttgctcatgtgcacctttgcgctcatcgcgcactggctagcctgcatctggtacgccatcggcaacatggagcagccacacatggactcacgcatcggctggctgcacaacctgggcgaccagataggcaaaccctacaacagcagcggcctgggcggcccctccatcaaggacaagtatgtgacggcgctctacttcaccttcagcagcctcaccagtgtgggcttcggcaacgtctctcccaacaccaactcagagaagatcttctccatctgcgtcatgctcattggctccctcatgtatgctagcatcttcggcaacgtgtcggccatcatccagcggctgtactcgggcacagcccgctaccacacacagatgctgcgggtgcgggagttcatccgcttccaccagatccccaatcccctgcgccagcgcctcgaggagtacttccagcacgcctggtcctacaccaacggcatcgacatgaacgcggtgctgaagggcttccctgagtgcctgcaggctgacatctgcctgcacctgaaccgctcactgctgcagcactgcaaacccttccgaggggccaccaagggctgccttcgggccctggccatgaagttcaagaccacacatgcaccgccaggggacacactggtgcatgctggggacctgctcaccgccctgtacttcatctcccggggctccatcgagatcctgcggggcgacgtcgtcgtggccatcctggggaagaatgacatctttggggagcctctgaacctgtatgcaaggcctggcaagtcgaacggggatgtgcgggccctcacctactgtgacctacacaagatccatcgggacgacctgctggaggtgctggacatgtaccctgagttctccgaccacttctggtccagcctggagatcaccttcaacctgcgagataccaacatgatcccgggctcccccggcagtacggagttagagggtggcttcagtcggcaacgcaagcgcaagttgtccttccgcaggcgcacggacaaggacacggagcagccaggggaggtgtcggccttggggccgggccgggcgggggcagggccgagtagccggggccggccgggggggccgtggggggagagcccgtccagtggcccctccagccctgagagcagtgaggatgagggcccaggccgcagctccagccccctccgcctggtgcccttctccagccccaggccccccggagagccgccgggtggggagcccctgatggaggactgcgagaagagcagcgacacttgcaaccccctgtcaggcgccttctcaggagtgtccaacattttcagcttctggggggacagtcggggccgccagtaccaggagctccctcgatgccccgcccccacccccagcctcctcaacatccccctctccagcccgggtcggcggccccggggcgacgtggagagcaggctggatgccctccagcgccagctcaacaggctggagacccggctgagtgcagacatggccactgtcctgcagctgctacagaggcagatgacgctggtcccgcccgcctacagtgctgtgaccaccccggggcctggccccacttccacatccccgctgttgcccgtcagccccctccccaccctcaccttggactcgctttctcaggtttcccagttcatggcgtgtgaggagctgcccccgggggccccagagcttccccaagaaggccccacacgacgcctctccctaccgggccagctgggggccctcacctcccagcccctgcacagacacggctcggacccgggcagttagtggggctgcccagtgtggacacgtggctcacccagggatcaaggcgctgctgggccgctccccttggaggccctgctcaggaggccctgaccgtggaaggggagaggaactcgaaagcacagctcctcccccagcccttgggaccatcttctcctgcagtcccctgggccccagtgagaggggcaggggcagggccggcagtaggtggggcctgtggtccccccactgccctgagggcattagctggtctaactgcccggaggcacccggccctgggccttaggcacctcaaggacttttctgctatttactgctcttattgttaaggataataattaaggatcatatgaataattaatgaagatgctgatgactatgaataataaataattatcctgaggaga

SEQ ID NO: 1029 - DNA, 3884 bp, Homo sapiens
  source 1..3884: mol_type = genomic DNA
  misc_feature 1..3884: note = cDNA of KCNH2 gene SNP c.92T>C (p.Ile31Thr)
atgccggtgcggaggggccacgtcgcgccgcagaacaccttcctggacaccatcatccgcaagtttgagggccagagccgtaagttcatcaccgccaacgctcgggtggagaactgcgccgtcatctactgcaacgacggcttctgcgagctgtgcggctactcgcgggccgaggtgatgcagcgaccctgcacctgcgacttcctgcacgggccgcgcacgcagcgccgcgctgccgcgcagatcgcgcaggcactgctgggcgccgaggagcgcaaagtggaaatcgccttctaccggaaagatgggagctgcttcctatgtctggtggatgtggtgcccgtgaagaacgaggatggggctgtcatcatgttcatcctcaatttcgaggtggtgatggagaaggacatggtggggtccccggctcatgacaccaaccaccggggcccccccaccagctggctggccccaggccgcgccaagaccttccgcctgaagctgcccgcgctgctggcgctgacggcccgggagtcgtcggtgcggtcgggcggcgcgggcggcgcgggcgccccgggggccgtggtggtggacgtggacctgacgcccgcggcacccagcagcgagtcgctggccctggacgaagtgacagccatggacaaccacgtggcagggctcgggcccgcggaggagcggcgtgcgctggtgggtcccggctctccgccccgcagcgcgcccggccagctcccatcgccccgggcgcacagcctcaaccccgacgcctcgggctccagctgcagcctggcccggacgcgctcccgagaaagctgcgccagcgtgcgccgcgcctcgtcggccgacgacatcgaggccatgcgcgccggggtgctgcccccgccaccgcgccacgccagcaccggggccatgcacccactgcgcagcggcttgctcaactccacctcggactccgacctcgtgcgctaccgcaccattagcaagattccccaaatcaccctcaactttgtggacctcaagggcgaccccttcttggcttcgcccaccagtgaccgtgagatcatagcacctaagataaaggagcgaacccacaatgtcactgagaaggtcacccaggtcctgtccctgggcgccgacgtgctgcctgagtacaagctgcaggcaccgcgcatccaccgctggaccatcctgcattacagccccttcaaggccgtgtgggactggctcatcctgctgctggtcatctacacggctgtcttcacaccctactcggctgccttcctgctgaaggagacggaagaaggcccgcctgctaccgagtgtggctacgcctgccagccgctggctgtggtggacctcatcgtggacatcatgttcattgtggacatcctcatcaacttccgcaccacctacgtcaatgccaacgaggaggtggtcagccaccccggccgcatcgccgtccactacttcaagggctggttcctcatcgacatggtggccgccatccccttcgacctgctcatcttcggctctggctctgaggagctgatcgggctgctgaagactgcgcggctgctgcggctggtgcgcgtggcgcggaagctggatcgctactcagagtacggcgcggccgtgctgttcttgctcatgtgcacctttgcgctcatcgcgcactggctagcctgcatctggtacgccatcggcaacatggagcagccacacatggactcacgcatcggctggctgcacaacctgggcgaccagataggcaaaccctacaacagcagcggcctgggcggcccctccatcaaggacaagtatgtgacggcgctctacttcaccttcagcagcctcaccagtgtgggcttcggcaacgtctctcccaacaccaactcagagaagatcttctccatctgcgtcatgctcattggctccctcatgtatgctagcatcttcggcaacgtgtcggccatcatccagcggctgtactcgggcacagcccgctaccacacacagatgctgcgggtgcgggagttcatccgcttccaccagatccccaatcccctgcgccagcgcctcgaggagtacttccagcacgcctggtcctacaccaacggcatcgacatgaacgcggtgctgaagggcttccctgagtgcctgcaggctgacatctgcctgcacctgaaccgctcactgctgcagcactgcaaacccttccgaggggccaccaagggctgccttcgggccctggccatgaagttcaagaccacacatgcaccgccaggggacacactggtgcatgctggggacctgctcaccgccctgtacttcatctcccggggctccatcgagatcctgcggggcgacgtcgtcgtggccatcctggggaagaatgacatctttggggagcctctgaacctgtatgcaaggcctggcaagtcgaacggggatgtgcgggccctcacctactgtgacctacacaagatccatcgggacgacctgctggaggtgctggacatgtaccctgagttctccgaccacttctggtccagcctggagatcaccttcaacctgcgagataccaacatgatcccgggctcccccggcagtacggagttagagggtggcttcagtcggcaacgcaagcgcaagttgtccttccgcaggcgcacggacaaggacacggagcagccaggggaggtgtcggccttggggccgggccgggcgggggcagggccgagtagccggggccggccgggggggccgtggggggagagcccgtccagtggcccctccagccctgagagcagtgaggatgagggcccaggccgcagctccagccccctccgcctggtgcccttctccagccccaggccccccggagagccgccgggtggggagcccctgatggaggactgcgagaagagcagcgacacttgcaaccccctgtcaggcgccttctcaggagtgtccaacattttcagcttctggggggacagtcggggccgccagtaccaggagctccctcgatgccccgcccccacccccagcctcctcaacatccccctctccagcccgggtcggcggccccggggcgacgtggagagcaggctggatgccctccagcgccagctcaacaggctggagacccggctgagtgcagacatggccactgtcctgcagctgctacagaggcagatgacgctggtcccgcccgcctacagtgctgtgaccaccccggggcctggccccacttccacatccccgctgttgcccgtcagccccctccccaccctcaccttggactcgctttctcaggtttcccagttcatggcgtgtgaggagctgcccccgggggccccagagcttccccaagaaggccccacacgacgcctctccctaccgggccagctgggggccctcacctcccagcccctgcacagacacggctcggacccgggcagttagtggggctgcccagtgtggacacgtggctcacccagggatcaaggcgctgctgggccgctccccttggaggccctgctcaggaggccctgaccgtggaaggggagaggaactcgaaagcacagctcctcccccagcccttgggaccatcttctcctgcagtcccctgggccccagtgagaggggcaggggcagggccggcagtaggtggggcctgtggtccccccactgccctgagggcattagctggtctaactgcccggaggcacccggccctgggccttaggcacctcaaggacttttctgctatttactgctcttattgttaaggataataattaaggatcatatgaataattaatgaagatgctgatgactatgaataataaataattatcctgaggaga

SEQ ID NO: 1030 - DNA, 3884 bp, Homo sapiens
  source 1..3884: mol_type = genomic DNA
  misc_feature 1..3884: note = cDNA of KCNH2 gene SNP c.92T>G (p.Ile31Ser)
atgccggtgcggaggggccacgtcgcgccgcagaacaccttcctggacaccatcatccgcaagtttgagggccagagccgtaagttcatcagcgccaacgctcgggtggagaactgcgccgtcatctactgcaacgacggcttctgcgagctgtgcggctactcgcgggccgaggtgatgcagcgaccctgcacctgcgacttcctgcacgggccgcgcacgcagcgccgcgctgccgcgcagatcgcgcaggcactgctgggcgccgaggagcgcaaagtggaaatcgccttctaccggaaagatgggagctgcttcctatgtctggtggatgtggtgcccgtgaagaacgaggatggggctgtcatcatgttcatcctcaatttcgaggtggtgatggagaaggacatggtggggtccccggctcatgacaccaaccaccggggcccccccaccagctggctggccccaggccgcgccaagaccttccgcctgaagctgcccgcgctgctggcgctgacggcccgggagtcgtcggtgcggtcgggcggcgcgggcggcgcgggcgccccgggggccgtggtggtggacgtggacctgacgcccgcggcacccagcagcgagtcgctggccctggacgaagtgacagccatggacaaccacgtggcagggctcgggcccgcggaggagcggcgtgcgctggtgggtcccggctctccgccccgcagcgcgcccggccagctcccatcgccccgggcgcacagcctcaaccccgacgcctcgggctccagctgcagcctggcccggacgcgctcccgagaaagctgcgccagcgtgcgccgcgcctcgtcggccgacgacatcgaggccatgcgcgccggggtgctgcccccgccaccgcgccacgccagcaccggggccatgcacccactgcgcagcggcttgctcaactccacctcggactccgacctcgtgcgctaccgcaccattagcaagattccccaaatcaccctcaactttgtggacctcaagggcgaccccttcttggcttcgcccaccagtgaccgtgagatcatagcacctaagataaaggagcgaacccacaatgtcactgagaaggtcacccaggtcctgtccctgggcgccgacgtgctgcctgagtacaagctgcaggcaccgcgcatccaccgctggaccatcctgcattacagccccttcaaggccgtgtgggactggctcatcctgctgctggtcatctacacggctgtcttcacaccctactcggctgccttcctgctgaaggagacggaagaaggcccgcctgctaccgagtgtggctacgcctgccagccgctggctgtggtggacctcatcgtggacatcatgttcattgtggacatcctcatcaacttccgcaccacctacgtcaatgccaacgaggaggtggtcagccaccccggccgcatcgccgtccactacttcaagggctggttcctcatcgacatggtggccgccatccccttcgacctgctcatcttcggctctggctctgaggagctgatcgggctgctgaagactgcgcggctgctgcggctggtgcgcgtggcgcggaagctggatcgctactcagagtacggcgcggccgtgctgttcttgctcatgtgcacctttgcgctcatcgcgcactggctagcctgcatctggtacgccatcggcaacatggagcagccacacatggactcacgcatcggctggctgcacaacctgggcgaccagataggcaaaccctacaacagcagcggcctgggcggcccctccatcaaggacaagtatgtgacggcgctctacttcaccttcagcagcctcaccagtgtgggcttcggcaacgtctctcccaacaccaactcagagaagatcttctccatctgcgtcatgctcattggctccctcatgtatgctagcatcttcggcaacgtgtcggccatcatccagcggctgtactcgggcacagcccgctaccacacacagatgctgcgggtgcgggagttcatccgcttccaccagatccccaatcccctgcgccagcgcctcgaggagtacttccagcacgcctggtcctacaccaacggcatcgacatgaacgcggtgctgaagggcttccctgagtgcctgcaggctgacatctgcctgcacctgaaccgctcactgctgcagcactgcaaacccttccgaggggccaccaagggctgccttcgggccctggccatgaagttcaagaccacacatgcaccgccaggggacacactggtgcatgctggggacctgctcaccgccctgtacttcatctcccggggctccatcgagatcctgcggggcgacgtcgtcgtggccatcctggggaagaatgacatctttggggagcctctgaacctgtatgcaaggcctggcaagtcgaacggggatgtgcgggccctcacctactgtgacctacacaagatccatcgggacgacctgctggaggtgctggacatgtaccctgagttctccgaccacttctggtccagcctggagatcaccttcaacctgcgagataccaacatgatcccgggctcccccggcagtacggagttagagggtggcttcagtcggcaacgcaagcgcaagttgtccttccgcaggcgcacggacaaggacacggagcagccaggggaggtgtcggccttggggccgggccgggcgggggcagggccgagtagccggggccggccgggggggccgtggggggagagcccgtccagtggcccctccagccctgagagcagtgaggatgagggcccaggccgcagctccagccccctccgcctggtgcccttctccagccccaggccccccggagagccgccgggtggggagcccctgatggaggactgcgagaagagcagcgacacttgcaaccccctgtcaggcgccttctcaggagtgtccaacattttcagcttctggggggacagtcggggccgccagtaccaggagctccctcgatgccccgcccccacccccagcctcctcaacatccccctctccagcccgggtcggcggccccggggcgacgtggagagcaggctggatgccctccagcgccagctcaacaggctggagacccggctgagtgcagacatggccactgtcctgcagctgctacagaggcagatgacgctggtcccgcccgcctacagtgctgtgaccaccccggggcctggccccacttccacatccccgctgttgcccgtcagccccctccccaccctcaccttggactcgctttctcaggtttcccagttcatggcgtgtgaggagctgcccccgggggccccagagcttccccaagaaggccccacacgacgcctctccctaccgggccagctgggggccctcacctcccagcccctgcacagacacggctcggacccgggcagttagtggggctgcccagtgtggacacgtggctcacccagggatcaaggcgctgctgggccgctccccttggaggccctgctcaggaggccctgaccgtggaaggggagaggaactcgaaagcacagctcctcccccagcccttgggaccatcttctcctgcagtcccctgggccccagtgagaggggcaggggcagggccggcagtaggtggggcctgtggtccccccactgccctgagggcattagctggtctaactgcccggaggcacccggccctgggccttaggcacctcaaggacttttctgctatttactgctcttattgttaaggataataattaaggatcatatgaataattaatgaagatgctgatgactatgaataataaataattatcctgaggaga

SEQ ID NO: 1031 - DNA, 3884 bp, Homo sapiens
  source 1..3884: mol_type = genomic DNA
  misc_feature 1..3884: note = cDNA of KCNH2 gene SNP c.934C>T (p.Arg312Cys)
atgccggtgcggaggggccacgtcgcgccgcagaacaccttcctggacaccatcatccgcaagtttgagggccagagccgtaagttcatcatcgccaacgctcgggtggagaactgcgccgtcatctactgcaacgacggcttctgcgagctgtgcggctactcgcgggccgaggtgatgcagcgaccctgcacctgcgacttcctgcacgggccgcgcacgcagcgccgcgctgccgcgcagatcgcgcaggcactgctgggcgccgaggagcgcaaagtggaaatcgccttctaccggaaagatgggagctgcttcctatgtctggtggatgtggtgcccgtgaagaacgaggatggggctgtcatcatgttcatcctcaatttcgaggtggtgatggagaaggacatggtggggtccccggctcatgacaccaaccaccggggcccccccaccagctggctggccccaggccgcgccaagaccttccgcctgaagctgcccgcgctgctggcgctgacggcccgggagtcgtcggtgcggtcgggcggcgcgggcggcgcgggcgccccgggggccgtggtggtggacgtggacctgacgcccgcggcacccagcagcgagtcgctggccctggacgaagtgacagccatggacaaccacgtggcagggctcgggcccgcggaggagcggcgtgcgctggtgggtcccggctctccgccccgcagcgcgcccggccagctcccatcgccccgggcgcacagcctcaaccccgacgcctcgggctccagctgcagcctggcccggacgcgctcccgagaaagctgcgccagcgtgcgccgcgcctcgtcggccgacgacatcgaggccatgcgcgccggggtgctgcccccgccaccgcgccacgccagcaccggggccatgcacccactgtgcagcggcttgctcaactccacctcggactccgacctcgtgcgctaccgcaccattagcaagattccccaaatcaccctcaactttgtggacctcaagggcgaccccttcttggcttcgcccaccagtgaccgtgagatcatagcacctaagataaaggagcgaacccacaatgtcactgagaaggtcacccaggtcctgtccctgggcgccgacgtgctgcctgagtacaagctgcaggcaccgcgcatccaccgctggaccatcctgcattacagccccttcaaggccgtgtgggactggctcatcctgctgctggtcatctacacggctgtcttcacaccctactcggctgccttcctgctgaaggagacggaagaaggcccgcctgctaccgagtgtggctacgcctgccagccgctggctgtggtggacctcatcgtggacatcatgttcattgtggacatcctcatcaacttccgcaccacctacgtcaatgccaacgaggaggtggtcagccaccccggccgcatcgccgtccactacttcaagggctggttcctcatcgacatggtggccgccatccccttcgacctgctcatcttcggctctggctctgaggagctgatcgggctgctgaagactgcgcggctgctgcggctggtgcgcgtggcgcggaagctggatcgctactcagagtacggcgcggccgtgctgttcttgctcatgtgcacctttgcgctcatcgcgcactggctagcctgcatctggtacgccatcggcaacatggagcagccacacatggactcacgcatcggctggctgcacaacctgggcgaccagataggcaaaccctacaacagcagcggcctgggcggcccctccatcaaggacaagtatgtgacggcgctctacttcaccttcagcagcctcaccagtgtgggcttcggcaacgtctctcccaacaccaactcagagaagatcttctccatctgcgtcatgctcattggctccctcatgtatgctagcatcttcggcaacgtgtcggccatcatccagcggctgtactcgggcacagcccgctaccacacacagatgctgcgggtgcgggagttcatccgcttccaccagatccccaatcccctgcgccagcgcctcgaggagtacttccagcacgcctggtcctacaccaacggcatcgacatgaacgcggtgctgaagggcttccctgagtgcctgcaggctgacatctgcctgcacctgaaccgctcactgctgcagcactgcaaacccttccgaggggccaccaagggctgccttcgggccctggccatgaagttcaagaccacacatgcaccgccaggggacacactggtgcatgctggggacctgctcaccgccctgtacttcatctcccggggctccatcgagatcctgcggggcgacgtcgtcgtggccatcctggggaagaatgacatctttggggagcctctgaacctgtatgcaaggcctggcaagtcgaacggggatgtgcgggccctcacctactgtgacctacacaagatccatcgggacgacctgctggaggtgctggacatgtaccctgagttctccgaccacttctggtccagcctggagatcaccttcaacctgcgagataccaacatgatcccgggctcccccggcagtacggagttagagggtggcttcagtcggcaacgcaagcgcaagttgtccttccgcaggcgcacggacaaggacacggagcagccaggggaggtgtcggccttggggccgggccgggcgggggcagggccgagtagccggggccggccgggggggccgtggggggagagcccgtccagtggcccctccagccctgagagcagtgaggatgagggcccaggccgcagctccagccccctccgcctggtgcccttctccagccccaggccccccggagagccgccgggtggggagcccctgatggaggactgcgagaagagcagcgacacttgcaaccccctgtcaggcgccttctcaggagtgtccaacattttcagcttctggggggacagtcggggccgccagtaccaggagctccctcgatgccccgcccccacccccagcctcctcaacatccccctctccagcccgggtcggcggccccggggcgacgtggagagcaggctggatgccctccagcgccagctcaacaggctggagacccggctgagtgcagacatggccactgtcctgcagctgctacagaggcagatgacgctggtcccgcccgcctacagtgctgtgaccaccccggggcctggccccacttccacatccccgctgttgcccgtcagccccctccccaccctcaccttggactcgctttctcaggtttcccagttcatggcgtgtgaggagctgcccccgggggccccagagcttccccaagaaggccccacacgacgcctctccctaccgggccagctgggggccctcacctcccagcccctgcacagacacggctcggacccgggcagttagtggggctgcccagtgtggacacgtggctcacccagggatcaaggcgctgctgggccgctccccttggaggccctgctcaggaggccctgaccgtggaaggggagaggaactcgaaagcacagctcctcccccagcccttgggaccatcttctcctgcagtcccctgggccccagtgagaggggcaggggcagggccggcagtaggtggggcctgtggtccccccactgccctgagggcattagctggtctaactgcccggaggcacccggccctgggccttaggcacctcaaggacttttctgctatttactgctcttattgttaaggataataattaaggatcatatgaataattaatgaagatgctgatgactatgaataataaataattatcctgaggaga

SEQ ID NO: 1032 - DNA, 3884 bp, Homo sapiens
  source 1..3884: mol_type = genomic DNA
  misc_feature 1..3884: note = cDNA of KCNH2 gene SNP c.935G>A (p.Arg312His)
atgccggtgcggaggggccacgtcgcgccgcagaacaccttcctggacaccatcatccgcaagtttgagggccagagccgtaagttcatcatcgccaacgctcgggtggagaactgcgccgtcatctactgcaacgacggcttctgcgagctgtgcggctactcgcgggccgaggtgatgcagcgaccctgcacctgcgacttcctgcacgggccgcgcacgcagcgccgcgctgccgcgcagatcgcgcaggcactgctgggcgccgaggagcgcaaagtggaaatcgccttctaccggaaagatgggagctgcttcctatgtctggtggatgtggtgcccgtgaagaacgaggatggggctgtcatcatgttcatcctcaatttcgaggtggtgatggagaaggacatggtggggtccccggctcatgacaccaaccaccggggcccccccaccagctggctggccccaggccgcgccaagaccttccgcctgaagctgcccgcgctgctggcgctgacggcccgggagtcgtcggtgcggtcgggcggcgcgggcggcgcgggcgccccgggggccgtggtggtggacgtggacctgacgcccgcggcacccagcagcgagtcgctggccctggacgaagtgacagccatggacaaccacgtggcagggctcgggcccgcggaggagcggcgtgcgctggtgggtcccggctctccgccccgcagcgcgcccggccagctcccatcgccccgggcgcacagcctcaaccccgacgcctcgggctccagctgcagcctggcccggacgcgctcccgagaaagctgcgccagcgtgcgccgcgcctcgtcggccgacgacatcgaggccatgcgcgccggggtgctgcccccgccaccgcgccacgccagcaccggggccatgcacccactgcacagcggcttgctcaactccacctcggactccgacctcgtgcgctaccgcaccattagcaagattccccaaatcaccctcaactttgtggacctcaagggcgaccccttcttggcttcgcccaccagtgaccgtgagatcatagcacctaagataaaggagcgaacccacaatgtcactgagaaggtcacccaggtcctgtccctgggcgccgacgtgctgcctgagtacaagctgcaggcaccgcgcatccaccgctggaccatcctgcattacagccccttcaaggccgtgtgggactggctcatcctgctgctggtcatctacacggctgtcttcacaccctactcggctgccttcctgctgaaggagacggaagaaggcccgcctgctaccgagtgtggctacgcctgccagccgctggctgtggtggacctcatcgtggacatcatgttcattgtggacatcctcatcaacttccgcaccacctacgtcaatgccaacgaggaggtggtcagccaccccggccgcatcgccgtccactacttcaagggctggttcctcatcgacatggtggccgccatccccttcgacctgctcatcttcggctctggctctgaggagctgatcgggctgctgaagactgcgcggctgctgcggctggtgcgcgtggcgcggaagctggatcgctactcagagtacggcgcggccgtgctgttcttgctcatgtgcacctttgcgctcatcgcgcactggctagcctgcatctggtacgccatcggcaacatggagcagccacacatggactcacgcatcggctggctgcacaacctgggcgaccagataggcaaaccctacaacagcagcggcctgggcggcccctccatcaaggacaagtatgtgacggcgctctacttcaccttcagcagcctcaccagtgtgggcttcggcaacgtctctcccaacaccaactcagagaagatcttctccatctgcgtcatgctcattggctccctcatgtatgctagcatcttcggcaacgtgtcggccatcatccagcggctgtactcgggcacagcccgctaccacacacagatgctgcgggtgcgggagttcatccgcttccaccagatccccaatcccctgcgccagcgcctcgaggagtacttccagcacgcctggtcctacaccaacggcatcgacatgaacgcggtgctgaagggcttccctgagtgcctgcaggctgacatctgcctgcacctgaaccgctcactgctgcagcactgcaaacccttccgaggggccaccaagggctgccttcgggccctggccatgaagttcaagaccacacatgcaccgccaggggacacactggtgcatgctggggacctgctcaccgccctgtacttcatctcccggggctccatcgagatcctgcggggcgacgtcgtcgtggccatcctggggaagaatgacatctttggggagcctctgaacctgtatgcaaggcctggcaagtcgaacggggatgtgcgggccctcacctactgtgacctacacaagatccatcgggacgacctgctggaggtgctggacatgtaccctgagttctccgaccacttctggtccagcctggagatcaccttcaacctgcgagataccaacatgatcccgggctcccccggcagtacggagttagagggtggcttcagtcggcaacgcaagcgcaagttgtccttccgcaggcgcacggacaaggacacggagcagccaggggaggtgtcggccttggggccgggccgggcgggggcagggccgagtagccggggccggccgggggggccgtggggggagagcccgtccagtggcccctccagccctgagagcagtgaggatgagggcccaggccgcagctccagccccctccgcctggtgcccttctccagccccaggccccccggagagccgccgggtggggagcccctgatggaggactgcgagaagagcagcgacacttgcaaccccctgtcaggcgccttctcaggagtgtccaacattttcagcttctggggggacagtcggggccgccagtaccaggagctccctcgatgccccgcccccacccccagcctcctcaacatccccctctccagcccgggtcggcggccccggggcgacgtggagagcaggctggatgccctccagcgccagctcaacaggctggagacccggctgagtgcagacatggccactgtcctgcagctgctacagaggcagatgacgctggtcccgcccgcctacagtgctgtgaccaccccggggcctggccccacttccacatccccgctgttgcccgtcagccccctccccaccctcaccttggactcgctttctcaggtttcccagttcatggcgtgtgaggagctgcccccgggggccccagagcttccccaagaaggccccacacgacgcctctccctaccgggccagctgggggccctcacctcccagcccctgcacagacacggctcggacccgggcagttagtggggctgcccagtgtggacacgtggctcacccagggatcaaggcgctgctgggccgctccccttggaggccctgctcaggaggccctgaccgtggaaggggagaggaactcgaaagcacagctcctcccccagcccttgggaccatcttctcctgcagtcccctgggccccagtgagaggggcaggggcagggccggcagtaggtggggcctgtggtccccccactgccctgagggcattagctggtctaactgcccggaggcacccggccctgggccttaggcacctcaaggacttttctgctatttactgctcttattgttaaggataataattaaggatcatatgaataattaatgaagatgctgatgactatgaataataaataattatcctgaggaga

SEQ ID NO: 1033 - DNA, 3884 bp, Homo sapiens
  source 1..3884: mol_type = genomic DNA
  misc_feature 1..3884: note = cDNA of KCNH2 gene SNP c.93C>G (p.Ile31Met)
atgccggtgcggaggggccacgtcgcgccgcagaacaccttcctggacaccatcatccgcaagtttgagggccagagccgtaagttcatcatggccaacgctcgggtggagaactgcgccgtcatctactgcaacgacggcttctgcgagctgtgcggctactcgcgggccgaggtgatgcagcgaccctgcacctgcgacttcctgcacgggccgcgcacgcagcgccgcgctgccgcgcagatcgcgcaggcactgctgggcgccgaggagcgcaaagtggaaatcgccttctaccggaaagatgggagctgcttcctatgtctggtggatgtggtgcccgtgaagaacgaggatggggctgtcatcatgttcatcctcaatttcgaggtggtgatggagaaggacatggtggggtccccggctcatgacaccaaccaccggggcccccccaccagctggctggccccaggccgcgccaagaccttccgcctgaagctgcccgcgctgctggcgctgacggcccgggagtcgtcggtgcggtcgggcggcgcgggcggcgcgggcgccccgggggccgtggtggtggacgtggacctgacgcccgcggcacccagcagcgagtcgctggccctggacgaagtgacagccatggacaaccacgtggcagggctcgggcccgcggaggagcggcgtgcgctggtgggtcccggctctccgccccgcagcgcgcccggccagctcccatcgccccgggcgcacagcctcaaccccgacgcctcgggctccagctgcagcctggcccggacgcgctcccgagaaagctgcgccagcgtgcgccgcgcctcgtcggccgacgacatcgaggccatgcgcgccggggtgctgcccccgccaccgcgccacgccagcaccggggccatgcacccactgcgcagcggcttgctcaactccacctcggactccgacctcgtgcgctaccgcaccattagcaagattccccaaatcaccctcaactttgtggacctcaagggcgaccccttcttggcttcgcccaccagtgaccgtgagatcatagcacctaagataaaggagcgaacccacaatgtcactgagaaggtcacccaggtcctgtccctgggcgccgacgtgctgcctgagtacaagctgcaggcaccgcgcatccaccgctggaccatcctgcattacagccccttcaaggccgtgtgggactggctcatcctgctgctggtcatctacacggctgtcttcacaccctactcggctgccttcctgctgaaggagacggaagaaggcccgcctgctaccgagtgtggctacgcctgccagccgctggctgtggtggacctcatcgtggacatcatgttcattgtggacatcctcatcaacttccgcaccacctacgtcaatgccaacgaggaggtggtcagccaccccggccgcatcgccgtccactacttcaagggctggttcctcatcgacatggtggccgccatccccttcgacctgctcatcttcggctctggctctgaggagctgatcgggctgctgaagactgcgcggctgctgcggctggtgcgcgtggcgcggaagctggatcgctactcagagtacggcgcggccgtgctgttcttgctcatgtgcacctttgcgctcatcgcgcactggctagcctgcatctggtacgccatcggcaacatggagcagccacacatggactcacgcatcggctggctgcacaacctgggcgaccagataggcaaaccctacaacagcagcggcctgggcggcccctccatcaaggacaagtatgtgacggcgctctacttcaccttcagcagcctcaccagtgtgggcttcggcaacgtctctcccaacaccaactcagagaagatcttctccatctgcgtcatgctcattggctccctcatgtatgctagcatcttcggcaacgtgtcggccatcatccagcggctgtactcgggcacagcccgctaccacacacagatgctgcgggtgcgggagttcatccgcttccaccagatccccaatcccctgcgccagcgcctcgaggagtacttccagcacgcctggtcctacaccaacggcatcgacatgaacgcggtgctgaagggcttccctgagtgcctgcaggctgacatctgcctgcacctgaaccgctcactgctgcagcactgcaaacccttccgaggggccaccaagggctgccttcgggccctggccatgaagttcaagaccacacatgcaccgccaggggacacactggtgcatgctggggacctgctcaccgccctgtacttcatctcccggggctccatcgagatcctgcggggcgacgtcgtcgtggccatcctggggaagaatgacatctttggggagcctctgaacctgtatgcaaggcctggcaagtcgaacggggatgtgcgggccctcacctactgtgacctacacaagatccatcgggacgacctgctggaggtgctggacatgtaccctgagttctccgaccacttctggtccagcctggagatcaccttcaacctgcgagataccaacatgatcccgggctcccccggcagtacggagttagagggtggcttcagtcggcaacgcaagcgcaagttgtccttccgcaggcgcacggacaaggacacggagcagccaggggaggtgtcggccttggggccgggccgggcgggggcagggccgagtagccggggccggccgggggggccgtggggggagagcccgtccagtggcccctccagccctgagagcagtgaggatgagggcccaggccgcagctccagccccctccgcctggtgcccttctccagccccaggccccccggagagccgccgggtggggagcccctgatggaggactgcgagaagagcagcgacacttgcaaccccctgtcaggcgccttctcaggagtgtccaacattttcagcttctggggggacagtcggggccgccagtaccaggagctccctcgatgccccgcccccacccccagcctcctcaacatccccctctccagcccgggtcggcggccccggggcgacgtggagagcaggctggatgccctccagcgccagctcaacaggctggagacccggctgagtgcagacatggccactgtcctgcagctgctacagaggcagatgacgctggtcccgcccgcctacagtgctgtgaccaccccggggcctggccccacttccacatccccgctgttgcccgtcagccccctccccaccctcaccttggactcgctttctcaggtttcccagttcatggcgtgtgaggagctgcccccgggggccccagagcttccccaagaaggccccacacgacgcctctccctaccgggccagctgggggccctcacctcccagcccctgcacagacacggctcggacccgggcagttagtggggctgcccagtgtggacacgtggctcacccagggatcaaggcgctgctgggccgctccccttggaggccctgctcaggaggccctgaccgtggaaggggagaggaactcgaaagcacagctcctcccccagcccttgggaccatcttctcctgcagtcccctgggccccagtgagaggggcaggggcagggccggcagtaggtggggcctgtggtccccccactgccctgagggcattagctggtctaactgcccggaggcacccggccctgggccttaggcacctcaaggacttttctgctatttactgctcttattgttaaggataataattaaggatcatatgaataattaatgaagatgctgatgactatgaataataaataattatcctgaggaga

SEQ ID NO: 1034 - DNA, 3884 bp, Homo sapiens
  source 1..3884: mol_type = genomic DNA
  misc_feature 1..3884: note = cDNA of KCNH2 gene SNP c.940G>A (p.Gly314Ser)
atgccggtgcggaggggccacgtcgcgccgcagaacaccttcctggacaccatcatccgcaagtttgagggccagagccgtaagttcatcatcgccaacgctcgggtggagaactgcgccgtcatctactgcaacgacggcttctgcgagctgtgcggctactcgcgggccgaggtgatgcagcgaccctgcacctgcgacttcctgcacgggccgcgcacgcagcgccgcgctgccgcgcagatcgcgcaggcactgctgggcgccgaggagcgcaaagtggaaatcgccttctaccggaaagatgggagctgcttcctatgtctggtggatgtggtgcccgtgaagaacgaggatggggctgtcatcatgttcatcctcaatttcgaggtggtgatggagaaggacatggtggggtccccggctcatgacaccaaccaccggggcccccccaccagctggctggccccaggccgcgccaagaccttccgcctgaagctgcccgcgctgctggcgctgacggcccgggagtcgtcggtgcggtcgggcggcgcgggcggcgcgggcgccccgggggccgtggtggtggacgtggacctgacgcccgcggcacccagcagcgagtcgctggccctggacgaagtgacagccatggacaaccacgtggcagggctcgggcccgcggaggagcggcgtgcgctggtgggtcccggctctccgccccgcagcgcgcccggccagctcccatcgccccgggcgcacagcctcaaccccgacgcctcgggctccagctgcagcctggcccggacgcgctcccgagaaagctgcgccagcgtgcgccgcgcctcgtcggccgacgacatcgaggccatgcgcgccggggtgctgcccccgccaccgcgccacgccagcaccggggccatgcacccactgcgcagcagcttgctcaactccacctcggactccgacctcgtgcgctaccgcaccattagcaagattccccaaatcaccctcaactttgtggacctcaagggcgaccccttcttggcttcgcccaccagtgaccgtgagatcatagcacctaagataaaggagcgaacccacaatgtcactgagaaggtcacccaggtcctgtccctgggcgccgacgtgctgcctgagtacaagctgcaggcaccgcgcatccaccgctggaccatcctgcattacagccccttcaaggccgtgtgggactggctcatcctgctgctggtcatctacacggctgtcttcacaccctactcggctgccttcctgctgaaggagacggaagaaggcccgcctgctaccgagtgtggctacgcctgccagccgctggctgtggtggacctcatcgtggacatcatgttcattgtggacatcctcatcaacttccgcaccacctacgtcaatgccaacgaggaggtggtcagccaccccggccgcatcgccgtccactacttcaagggctggttcctcatcgacatggtggccgccatccccttcgacctgctcatcttcggctctggctctgaggagctgatcgggctgctgaagactgcgcggctgctgcggctggtgcgcgtggcgcggaagctggatcgctactcagagtacggcgcggccgtgctgttcttgctcatgtgcacctttgcgctcatcgcgcactggctagcctgcatctggtacgccatcggcaacatggagcagccacacatggactcacgcatcggctggctgcacaacctgggcgaccagataggcaaaccctacaacagcagcggcctgggcggcccctccatcaaggacaagtatgtgacggcgctctacttcaccttcagcagcctcaccagtgtgggcttcggcaacgtctctcccaacaccaactcagagaagatcttctccatctgcgtcatgctcattggctccctcatgtatgctagcatcttcggcaacgtgtcggccatcatccagcggctgtactcgggcacagcccgctaccacacacagatgctgcgggtgcgggagttcatccgcttccaccagatccccaatcccctgcgccagcgcctcgaggagtacttccagcacgcctggtcctacaccaacggcatcgacatgaacgcggtgctgaagggcttccctgagtgcctgcaggctgacatctgcctgcacctgaaccgctcactgctgcagcactgcaaacccttccgaggggccaccaagggctgccttcgggccctggccatgaagttcaagaccacacatgcaccgccaggggacacactggtgcatgctggggacctgctcaccgccctgtacttcatctcccggggctccatcgagatcctgcggggcgacgtcgtcgtggccatcctggggaagaatgacatctttggggagcctctgaacctgtatgcaaggcctggcaagtcgaacggggatgtgcgggccctcacctactgtgacctacacaagatccatcgggacgacctgctggaggtgctggacatgtaccctgagttctccgaccacttctggtccagcctggagatcaccttcaacctgcgagataccaacatgatcccgggctcccccggcagtacggagttagagggtggcttcagtcggcaacgcaagcgcaagttgtccttccgcaggcgcacggacaaggacacggagcagccaggggaggtgtcggccttggggccgggccgggcgggggcagggccgagtagccggggccggccgggggggccgtggggggagagcccgtccagtggcccctccagccctgagagcagtgaggatgagggcccaggccgcagctccagccccctccgcctggtgcccttctccagccccaggccccccggagagccgccgggtggggagcccctgatggaggactgcgagaagagcagcgacacttgcaaccccctgtcaggcgccttctcaggagtgtccaacattttcagcttctggggggacagtcggggccgccagtaccaggagctccctcgatgccccgcccccacccccagcctcctcaacatccccctctccagcccgggtcggcggccccggggcgacgtggagagcaggctggatgccctccagcgccagctcaacaggctggagacccggctgagtgcagacatggccactgtcctgcagctgctacagaggcagatgacgctggtcccgcccgcctacagtgctgtgaccaccccggggcctggccccacttccacatccccgctgttgcccgtcagccccctccccaccctcaccttggactcgctttctcaggtttcccagttcatggcgtgtgaggagctgcccccgggggccccagagcttccccaagaaggccccacacgacgcctctccctaccgggccagctgggggccctcacctcccagcccctgcacagacacggctcggacccgggcagttagtggggctgcccagtgtggacacgtggctcacccagggatcaaggcgctgctgggccgctccccttggaggccctgctcaggaggccctgaccgtggaaggggagaggaactcgaaagcacagctcctcccccagcccttgggaccatcttctcctgcagtcccctgggccccagtgagaggggcaggggcagggccggcagtaggtggggcctgtggtccccccactgccctgagggcattagctggtctaactgcccggaggcacccggccctgggccttaggcacctcaaggacttttctgctatttactgctcttattgttaaggataataattaaggatcatatgaataattaatgaagatgctgatgactatgaataataaataattatcctgaggaga

SEQ ID NO: 1035 - DNA, 3884 bp, Homo sapiens
  source 1..3884: mol_type = genomic DNA
  misc_feature 1..3884: note = cDNA of KCNH2 gene SNP c.941G>A (p.Gly314Asp)
atgccggtgcggaggggccacgtcgcgccgcagaacaccttcctggacaccatcatccgcaagtttgagggccagagccgtaagttcatcatcgccaacgctcgggtggagaactgcgccgtcatctactgcaacgacggcttctgcgagctgtgcggctactcgcgggccgaggtgatgcagcgaccctgcacctgcgacttcctgcacgggccgcgcacgcagcgccgcgctgccgcgcagatcgcgcaggcactgctgggcgccgaggagcgcaaagtggaaatcgccttctaccggaaagatgggagctgcttcctatgtctggtggatgtggtgcccgtgaagaacgaggatggggctgtcatcatgttcatcctcaatttcgaggtggtgatggagaaggacatggtggggtccccggctcatgacaccaaccaccggggcccccccaccagctggctggccccaggccgcgccaagaccttccgcctgaagctgcccgcgctgctggcgctgacggcccgggagtcgtcggtgcggtcgggcggcgcgggcggcgcgggcgccccgggggccgtggtggtggacgtggacctgacgcccgcggcacccagcagcgagtcgctggccctggacgaagtgacagccatggacaaccacgtggcagggctcgggcccgcggaggagcggcgtgcgctggtgggtcccggctctccgccccgcagcgcgcccggccagctcccatcgccccgggcgcacagcctcaaccccgacgcctcgggctccagctgcagcctggcccggacgcgctcccgagaaagctgcgccagcgtgcgccgcgcctcgtcggccgacgacatcgaggccatgcgcgccggggtgctgcccccgccaccgcgccacgccagcaccggggccatgcacccactgcgcagcgacttgctcaactccacctcggactccgacctcgtgcgctaccgcaccattagcaagattccccaaatcaccctcaactttgtggacctcaagggcgaccccttcttggcttcgcccaccagtgaccgtgagatcatagcacctaagataaaggagcgaacccacaatgtcactgagaaggtcacccaggtcctgtccctgggcgccgacgtgctgcctgagtacaagctgcaggcaccgcgcatccaccgctggaccatcctgcattacagccccttcaaggccgtgtgggactggctcatcctgctgctggtcatctacacggctgtcttcacaccctactcggctgccttcctgctgaaggagacggaagaaggcccgcctgctaccgagtgtggctacgcctgccagccgctggctgtggtggacctcatcgtggacatcatgttcattgtggacatcctcatcaacttccgcaccacctacgtcaatgccaacgaggaggtggtcagccaccccggccgcatcgccgtccactacttcaagggctggttcctcatcgacatggtggccgccatccccttcgacctgctcatcttcggctctggctctgaggagctgatcgggctgctgaagactgcgcggctgctgcggctggtgcgcgtggcgcggaagctggatcgctactcagagtacggcgcggccgtgctgttcttgctcatgtgcacctttgcgctcatcgcgcactggctagcctgcatctggtacgccatcggcaacatggagcagccacacatggactcacgcatcggctggctgcacaacctgggcgaccagataggcaaaccctacaacagcagcggcctgggcggcccctccatcaaggacaagtatgtgacggcgctctacttcaccttcagcagcctcaccagtgtgggcttcggcaacgtctctcccaacaccaactcagagaagatcttctccatctgcgtcatgctcattggctccctcatgtatgctagcatcttcggcaacgtgtcggccatcatccagcggctgtactcgggcacagcccgctaccacacacagatgctgcgggtgcgggagttcatccgcttccaccagatccccaatcccctgcgccagcgcctcgaggagtacttccagcacgcctggtcctacaccaacggcatcgacatgaacgcggtgctgaagggcttccctgagtgcctgcaggctgacatctgcctgcacctgaaccgctcactgctgcagcactgcaaacccttccgaggggccaccaagggctgccttcgggccctggccatgaagttcaagaccacacatgcaccgccaggggacacactggtgcatgctggggacctgctcaccgccctgtacttcatctcccggggctccatcgagatcctgcggggcgacgtcgtcgtggccatcctggggaagaatgacatctttggggagcctctgaacctgtatgcaaggcctggcaagtcgaacggggatgtgcgggccctcacctactgtgacctacacaagatccatcgggacgacctgctggaggtgctggacatgtaccctgagttctccgaccacttctggtccagcctggagatcaccttcaacctgcgagataccaacatgatcccgggctcccccggcagtacggagttagagggtggcttcagtcggcaacgcaagcgcaagttgtccttccgcaggcgcacggacaaggacacggagcagccaggggaggtgtcggccttggggccgggccgggcgggggcagggccgagtagccggggccggccgggggggccgtggggggagagcccgtccagtggcccctccagccctgagagcagtgaggatgagggcccaggccgcagctccagccccctccgcctggtgcccttctccagccccaggccccccggagagccgccgggtggggagcccctgatggaggactgcgagaagagcagcgacacttgcaaccccctgtcaggcgccttctcaggagtgtccaacattttcagcttctggggggacagtcggggccgccagtaccaggagctccctcgatgccccgcccccacccccagcctcctcaacatccccctctccagcccgggtcggcggccccggggcgacgtggagagcaggctggatgccctccagcgccagctcaacaggctggagacccggctgagtgcagacatggccactgtcctgcagctgctacagaggcagatgacgctggtcccgcccgcctacagtgctgtgaccaccccggggcctggccccacttccacatccccgctgttgcccgtcagccccctccccaccctcaccttggactcgctttctcaggtttcccagttcatggcgtgtgaggagctgcccccgggggccccagagcttccccaagaaggccccacacgacgcctctccctaccgggccagctgggggccctcacctcccagcccctgcacagacacggctcggacccgggcagttagtggggctgcccagtgtggacacgtggctcacccagggatcaaggcgctgctgggccgctccccttggaggccctgctcaggaggccctgaccgtggaaggggagaggaactcgaaagcacagctcctcccccagcccttgggaccatcttctcctgcagtcccctgggccccagtgagaggggcaggggcagggccggcagtaggtggggcctgtggtccccccactgccctgagggcattagctggtctaactgcccggaggcacccggccctgggccttaggcacctcaaggacttttctgctatttactgctcttattgttaaggataataattaaggatcatatgaataattaatgaagatgctgatgactatgaataataaataattatcctgaggaga

SEQ ID NO: 1036 - DNA, 3884 bp, Homo sapiens
  source 1..3884: mol_type = genomic DNA
  misc_feature 1..3884: note = cDNA of KCNH2 gene SNP c.94G>A (p.Ala32Thr)
atgccggtgcggaggggccacgtcgcgccgcagaacaccttcctggacaccatcatccgcaagtttgagggccagagccgtaagttcatcatcaccaacgctcgggtggagaactgcgccgtcatctactgcaacgacggcttctgcgagctgtgcggctactcgcgggccgaggtgatgcagcgaccctgcacctgcgacttcctgcacgggccgcgcacgcagcgccgcgctgccgcgcagatcgcgcaggcactgctgggcgccgaggagcgcaaagtggaaatcgccttctaccggaaagatgggagctgcttcctatgtctggtggatgtggtgcccgtgaagaacgaggatggggctgtcatcatgttcatcctcaatttcgaggtggtgatggagaaggacatggtggggtccccggctcatgacaccaaccaccggggcccccccaccagctggctggccccaggccgcgccaagaccttccgcctgaagctgcccgcgctgctggcgctgacggcccgggagtcgtcggtgcggtcgggcggcgcgggcggcgcgggcgccccgggggccgtggtggtggacgtggacctgacgcccgcggcacccagcagcgagtcgctggccctggacgaagtgacagccatggacaaccacgtggcagggctcgggcccgcggaggagcggcgtgcgctggtgggtcccggctctccgccccgcagcgcgcccggccagctcccatcgccccgggcgcacagcctcaaccccgacgcctcgggctccagctgcagcctggcccggacgcgctcccgagaaagctgcgccagcgtgcgccgcgcctcgtcggccgacgacatcgaggccatgcgcgccggggtgctgcccccgccaccgcgccacgccagcaccggggccatgcacccactgcgcagcggcttgctcaactccacctcggactccgacctcgtgcgctaccgcaccattagcaagattccccaaatcaccctcaactttgtggacctcaagggcgaccccttcttggcttcgcccaccagtgaccgtgagatcatagcacctaagataaaggagcgaacccacaatgtcactgagaaggtcacccaggtcctgtccctgggcgccgacgtgctgcctgagtacaagctgcaggcaccgcgcatccaccgctggaccatcctgcattacagccccttcaaggccgtgtgggactggctcatcctgctgctggtcatctacacggctgtcttcacaccctactcggctgccttcctgctgaaggagacggaagaaggcccgcctgctaccgagtgtggctacgcctgccagccgctggctgtggtggacctcatcgtggacatcatgttcattgtggacatcctcatcaacttccgcaccacctacgtcaatgccaacgaggaggtggtcagccaccccggccgcatcgccgtccactacttcaagggctggttcctcatcgacatggtggccgccatccccttcgacctgctcatcttcggctctggctctgaggagctgatcgggctgctgaagactgcgcggctgctgcggctggtgcgcgtggcgcggaagctggatcgctactcagagtacggcgcggccgtgctgttcttgctcatgtgcacctttgcgctcatcgcgcactggctagcctgcatctggtacgccatcggcaacatggagcagccacacatggactcacgcatcggctggctgcacaacctgggcgaccagataggcaaaccctacaacagcagcggcctgggcggcccctccatcaaggacaagtatgtgacggcgctctacttcaccttcagcagcctcaccagtgtgggcttcggcaacgtctctcccaacaccaactcagagaagatcttctccatctgcgtcatgctcattggctccctcatgtatgctagcatcttcggcaacgtgtcggccatcatccagcggctgtactcgggcacagcccgctaccacacacagatgctgcgggtgcgggagttcatccgcttccaccagatccccaatcccctgcgccagcgcctcgaggagtacttccagcacgcctggtcctacaccaacggcatcgacatgaacgcggtgctgaagggcttccctgagtgcctgcaggctgacatctgcctgcacctgaaccgctcactgctgcagcactgcaaacccttccgaggggccaccaagggctgccttcgggccctggccatgaagttcaagaccacacatgcaccgccaggggacacactggtgcatgctggggacctgctcaccgccctgtacttcatctcccggggctccatcgagatcctgcggggcgacgtcgtcgtggccatcctggggaagaatgacatctttggggagcctctgaacctgtatgcaaggcctggcaagtcgaacggggatgtgcgggccctcacctactgtgacctacacaagatccatcgggacgacctgctggaggtgctggacatgtaccctgagttctccgaccacttctggtccagcctggagatcaccttcaacctgcgagataccaacatgatcccgggctcccccggcagtacggagttagagggtggcttcagtcggcaacgcaagcgcaagttgtccttccgcaggcgcacggacaaggacacggagcagccaggggaggtgtcggccttggggccgggccgggcgggggcagggccgagtagccggggccggccgggggggccgtggggggagagcccgtccagtggcccctccagccctgagagcagtgaggatgagggcccaggccgcagctccagccccctccgcctggtgcccttctccagccccaggccccccggagagccgccgggtggggagcccctgatggaggactgcgagaagagcagcgacacttgcaaccccctgtcaggcgccttctcaggagtgtccaacattttcagcttctggggggacagtcggggccgccagtaccaggagctccctcgatgccccgcccccacccccagcctcctcaacatccccctctccagcccgggtcggcggccccggggcgacgtggagagcaggctggatgccctccagcgccagctcaacaggctggagacccggctgagtgcagacatggccactgtcctgcagctgctacagaggcagatgacgctggtcccgcccgcctacagtgctgtgaccaccccggggcctggccccacttccacatccccgctgttgcccgtcagccccctccccaccctcaccttggactcgctttctcaggtttcccagttcatggcgtgtgaggagctgcccccgggggccccagagcttccccaagaaggccccacacgacgcctctccctaccgggccagctgggggccctcacctcccagcccctgcacagacacggctcggacccgggcagttagtggggctgcccagtgtggacacgtggctcacccagggatcaaggcgctgctgggccgctccccttggaggccctgctcaggaggccctgaccgtggaaggggagaggaactcgaaagcacagctcctcccccagcccttgggaccatcttctcctgcagtcccctgggccccagtgagaggggcaggggcagggccggcagtaggtggggcctgtggtccccccactgccctgagggcattagctggtctaactgcccggaggcacccggccctgggccttaggcacctcaaggacttttctgctatttactgctcttattgttaaggataataattaaggatcatatgaataattaatgaagatgctgatgactatgaataataaataattatcctgaggaga

SEQ ID NO: 1037 - DNA, 3884 bp, Homo sapiens
  source 1..3884: mol_type = genomic DNA
  misc_feature 1..3884: note = cDNA of KCNH2 gene SNP c.950A>G (p.Asn317Ser)
atgccggtgcggaggggccacgtcgcgccgcagaacaccttcctggacaccatcatccgcaagtttgagggccagagccgtaagttcatcatcgccaacgctcgggtggagaactgcgccgtcatctactgcaacgacggcttctgcgagctgtgcggctactcgcgggccgaggtgatgcagcgaccctgcacctgcgacttcctgcacgggccgcgcacgcagcgccgcgctgccgcgcagatcgcgcaggcactgctgggcgccgaggagcgcaaagtggaaatcgccttctaccggaaagatgggagctgcttcctatgtctggtggatgtggtgcccgtgaagaacgaggatggggctgtcatcatgttcatcctcaatttcgaggtggtgatggagaaggacatggtggggtccccggctcatgacaccaaccaccggggcccccccaccagctggctggccccaggccgcgccaagaccttccgcctgaagctgcccgcgctgctggcgctgacggcccgggagtcgtcggtgcggtcgggcggcgcgggcggcgcgggcgccccgggggccgtggtggtggacgtggacctgacgcccgcggcacccagcagcgagtcgctggccctggacgaagtgacagccatggacaaccacgtggcagggctcgggcccgcggaggagcggcgtgcgctggtgggtcccggctctccgccccgcagcgcgcccggccagctcccatcgccccgggcgcacagcctcaaccccgacgcctcgggctccagctgcagcctggcccggacgcgctcccgagaaagctgcgccagcgtgcgccgcgcctcgtcggccgacgacatcgaggccatgcgcgccggggtgctgcccccgccaccgcgccacgccagcaccggggccatgcacccactgcgcagcggcttgctcagctccacctcggactccgacctcgtgcgctaccgcaccattagcaagattccccaaatcaccctcaactttgtggacctcaagggcgaccccttcttggcttcgcccaccagtgaccgtgagatcatagcacctaagataaaggagcgaacccacaatgtcactgagaaggtcacccaggtcctgtccctgggcgccgacgtgctgcctgagtacaagctgcaggcaccgcgcatccaccgctggaccatcctgcattacagccccttcaaggccgtgtgggactggctcatcctgctgctggtcatctacacggctgtcttcacaccctactcggctgccttcctgctgaaggagacggaagaaggcccgcctgctaccgagtgtggctacgcctgccagccgctggctgtggtggacctcatcgtggacatcatgttcattgtggacatcctcatcaacttccgcaccacctacgtcaatgccaacgaggaggtggtcagccaccccggccgcatcgccgtccactacttcaagggctggttcctcatcgacatggtggccgccatccccttcgacctgctcatcttcggctctggctctgaggagctgatcgggctgctgaagactgcgcggctgctgcggctggtgcgcgtggcgcggaagctggatcgctactcagagtacggcgcggccgtgctgttcttgctcatgtgcacctttgcgctcatcgcgcactggctagcctgcatctggtacgccatcggcaacatggagcagccacacatggactcacgcatcggctggctgcacaacctgggcgaccagataggcaaaccctacaacagcagcggcctgggcggcccctccatcaaggacaagtatgtgacggcgctctacttcaccttcagcagcctcaccagtgtgggcttcggcaacgtctctcccaacaccaactcagagaagatcttctccatctgcgtcatgctcattggctccctcatgtatgctagcatcttcggcaacgtgtcggccatcatccagcggctgtactcgggcacagcccgctaccacacacagatgctgcgggtgcgggagttcatccgcttccaccagatccccaatcccctgcgccagcgcctcgaggagtacttccagcacgcctggtcctacaccaacggcatcgacatgaacgcggtgctgaagggcttccctgagtgcctgcaggctgacatctgcctgcacctgaaccgctcactgctgcagcactgcaaacccttccgaggggccaccaagggctgccttcgggccctggccatgaagttcaagaccacacatgcaccgccaggggacacactggtgcatgctggggacctgctcaccgccctgtacttcatctcccggggctccatcgagatcctgcggggcgacgtcgtcgtggccatcctggggaagaatgacatctttggggagcctctgaacctgtatgcaaggcctggcaagtcgaacggggatgtgcgggccctcacctactgtgacctacacaagatccatcgggacgacctgctggaggtgctggacatgtaccctgagttctccgaccacttctggtccagcctggagatcaccttcaacctgcgagataccaacatgatcccgggctcccccggcagtacggagttagagggtggcttcagtcggcaacgcaagcgcaagttgtccttccgcaggcgcacggacaaggacacggagcagccaggggaggtgtcggccttggggccgggccgggcgggggcagggccgagtagccggggccggccgggggggccgtggggggagagcccgtccagtggcccctccagccctgagagcagtgaggatgagggcccaggccgcagctccagccccctccgcctggtgcccttctccagccccaggccccccggagagccgccgggtggggagcccctgatggaggactgcgagaagagcagcgacacttgcaaccccctgtcaggcgccttctcaggagtgtccaacattttcagcttctggggggacagtcggggccgccagtaccaggagctccctcgatgccccgcccccacccccagcctcctcaacatccccctctccagcccgggtcggcggccccggggcgacgtggagagcaggctggatgccctccagcgccagctcaacaggctggagacccggctgagtgcagacatggccactgtcctgcagctgctacagaggcagatgacgctggtcccgcccgcctacagtgctgtgaccaccccggggcctggccccacttccacatccccgctgttgcccgtcagccccctccccaccctcaccttggactcgctttctcaggtttcccagttcatggcgtgtgaggagctgcccccgggggccccagagcttccccaagaaggccccacacgacgcctctccctaccgggccagctgggggccctcacctcccagcccctgcacagacacggctcggacccgggcagttagtggggctgcccagtgtggacacgtggctcacccagggatcaaggcgctgctgggccgctccccttggaggccctgctcaggaggccctgaccgtggaaggggagaggaactcgaaagcacagctcctcccccagcccttgggaccatcttctcctgcagtcccctgggccccagtgagaggggcaggggcagggccggcagtaggtggggcctgtggtccccccactgccctgagggcattagctggtctaactgcccggaggcacccggccctgggccttaggcacctcaaggacttttctgctatttactgctcttattgttaaggataataattaaggatcatatgaataattaatgaagatgctgatgactatgaataataaataattatcctgaggaga

SEQ ID NO: 1038 - DNA, 3884 bp, Homo sapiens
  source 1..3884: mol_type = genomic DNA
  misc_feature 1..3884: note = cDNA of KCNH2 gene SNP c.959C>A (p.Ser320Ter)
atgccggtgcggaggggccacgtcgcgccgcagaacaccttcctggacaccatcatccgcaagtttgagggccagagccgtaagttcatcatcgccaacgctcgggtggagaactgcgccgtcatctactgcaacgacggcttctgcgagctgtgcggctactcgcgggccgaggtgatgcagcgaccctgcacctgcgacttcctgcacgggccgcgcacgcagcgccgcgctgccgcgcagatcgcgcaggcactgctgggcgccgaggagcgcaaagtggaaatcgccttctaccggaaagatgggagctgcttcctatgtctggtggatgtggtgcccgtgaagaacgaggatggggctgtcatcatgttcatcctcaatttcgaggtggtgatggagaaggacatggtggggtccccggctcatgacaccaaccaccggggcccccccaccagctggctggccccaggccgcgccaagaccttccgcctgaagctgcccgcgctgctggcgctgacggcccgggagtcgtcggtgcggtcgggcggcgcgggcggcgcgggcgccccgggggccgtggtggtggacgtggacctgacgcccgcggcacccagcagcgagtcgctggccctggacgaagtgacagccatggacaaccacgtggcagggctcgggcccgcggaggagcggcgtgcgctggtgggtcccggctctccgccccgcagcgcgcccggccagctcccatcgccccgggcgcacagcctcaaccccgacgcctcgggctccagctgcagcctggcccggacgcgctcccgagaaagctgcgccagcgtgcgccgcgcctcgtcggccgacgacatcgaggccatgcgcgccggggtgctgcccccgccaccgcgccacgccagcaccggggccatgcacccactgcgcagcggcttgctcaactccacctaggactccgacctcgtgcgctaccgcaccattagcaagattccccaaatcaccctcaactttgtggacctcaagggcgaccccttcttggcttcgcccaccagtgaccgtgagatcatagcacctaagataaaggagcgaacccacaatgtcactgagaaggtcacccaggtcctgtccctgggcgccgacgtgctgcctgagtacaagctgcaggcaccgcgcatccaccgctggaccatcctgcattacagccccttcaaggccgtgtgggactggctcatcctgctgctggtcatctacacggctgtcttcacaccctactcggctgccttcctgctgaaggagacggaagaaggcccgcctgctaccgagtgtggctacgcctgccagccgctggctgtggtggacctcatcgtggacatcatgttcattgtggacatcctcatcaacttccgcaccacctacgtcaatgccaacgaggaggtggtcagccaccccggccgcatcgccgtccactacttcaagggctggttcctcatcgacatggtggccgccatccccttcgacctgctcatcttcggctctggctctgaggagctgatcgggctgctgaagactgcgcggctgctgcggctggtgcgcgtggcgcggaagctggatcgctactcagagtacggcgcggccgtgctgttcttgctcatgtgcacctttgcgctcatcgcgcactggctagcctgcatctggtacgccatcggcaacatggagcagccacacatggactcacgcatcggctggctgcacaacctgggcgaccagataggcaaaccctacaacagcagcggcctgggcggcccctccatcaaggacaagtatgtgacggcgctctacttcaccttcagcagcctcaccagtgtgggcttcggcaacgtctctcccaacaccaactcagagaagatcttctccatctgcgtcatgctcattggctccctcatgtatgctagcatcttcggcaacgtgtcggccatcatccagcggctgtactcgggcacagcccgctaccacacacagatgctgcgggtgcgggagttcatccgcttccaccagatccccaatcccctgcgccagcgcctcgaggagtacttccagcacgcctggtcctacaccaacggcatcgacatgaacgcggtgctgaagggcttccctgagtgcctgcaggctgacatctgcctgcacctgaaccgctcactgctgcagcactgcaaacccttccgaggggccaccaagggctgccttcgggccctggccatgaagttcaagaccacacatgcaccgccaggggacacactggtgcatgctggggacctgctcaccgccctgtacttcatctcccggggctccatcgagatcctgcggggcgacgtcgtcgtggccatcctggggaagaatgacatctttggggagcctctgaacctgtatgcaaggcctggcaagtcgaacggggatgtgcgggccctcacctactgtgacctacacaagatccatcgggacgacctgctggaggtgctggacatgtaccctgagttctccgaccacttctggtccagcctggagatcaccttcaacctgcgagataccaacatgatcccgggctcccccggcagtacggagttagagggtggcttcagtcggcaacgcaagcgcaagttgtccttccgcaggcgcacggacaaggacacggagcagccaggggaggtgtcggccttggggccgggccgggcgggggcagggccgagtagccggggccggccgggggggccgtggggggagagcccgtccagtggcccctccagccctgagagcagtgaggatgagggcccaggccgcagctccagccccctccgcctggtgcccttctccagccccaggccccccggagagccgccgggtggggagcccctgatggaggactgcgagaagagcagcgacacttgcaaccccctgtcaggcgccttctcaggagtgtccaacattttcagcttctggggggacagtcggggccgccagtaccaggagctccctcgatgccccgcccccacccccagcctcctcaacatccccctctccagcccgggtcggcggccccggggcgacgtggagagcaggctggatgccctccagcgccagctcaacaggctggagacccggctgagtgcagacatggccactgtcctgcagctgctacagaggcagatgacgctggtcccgcccgcctacagtgctgtgaccaccccggggcctggccccacttccacatccccgctgttgcccgtcagccccctccccaccctcaccttggactcgctttctcaggtttcccagttcatggcgtgtgaggagctgcccccgggggccccagagcttccccaagaaggccccacacgacgcctctccctaccgggccagctgggggccctcacctcccagcccctgcacagacacggctcggacccgggcagttagtggggctgcccagtgtggacacgtggctcacccagggatcaaggcgctgctgggccgctccccttggaggccctgctcaggaggccctgaccgtggaaggggagaggaactcgaaagcacagctcctcccccagcccttgggaccatcttctcctgcagtcccctgggccccagtgagaggggcaggggcagggccggcagtaggtggggcctgtggtccccccactgccctgagggcattagctggtctaactgcccggaggcacccggccctgggccttaggcacctcaaggacttttctgctatttactgctcttattgttaaggataataattaaggatcatatgaataattaatgaagatgctgatgactatgaataataaataattatcctgaggaga

SEQ ID NO: 1039 - DNA, 3884 bp, Homo sapiens
  source 1..3884: mol_type = genomic DNA
  misc_feature 1..3884: note = cDNA of KCNH2 gene SNP c.959C>G (p.Ser320Trp)
atgccggtgcggaggggccacgtcgcgccgcagaacaccttcctggacaccatcatccgcaagtttgagggccagagccgtaagttcatcatcgccaacgctcgggtggagaactgcgccgtcatctactgcaacgacggcttctgcgagctgtgcggctactcgcgggccgaggtgatgcagcgaccctgcacctgcgacttcctgcacgggccgcgcacgcagcgccgcgctgccgcgcagatcgcgcaggcactgctgggcgccgaggagcgcaaagtggaaatcgccttctaccggaaagatgggagctgcttcctatgtctggtggatgtggtgcccgtgaagaacgaggatggggctgtcatcatgttcatcctcaatttcgaggtggtgatggagaaggacatggtggggtccccggctcatgacaccaaccaccggggcccccccaccagctggctggccccaggccgcgccaagaccttccgcctgaagctgcccgcgctgctggcgctgacggcccgggagtcgtcggtgcggtcgggcggcgcgggcggcgcgggcgccccgggggccgtggtggtggacgtggacctgacgcccgcggcacccagcagcgagtcgctggccctggacgaagtgacagccatggacaaccacgtggcagggctcgggcccgcggaggagcggcgtgcgctggtgggtcccggctctccgccccgcagcgcgcccggccagctcccatcgccccgggcgcacagcctcaaccccgacgcctcgggctccagctgcagcctggcccggacgcgctcccgagaaagctgcgccagcgtgcgccgcgcctcgtcggccgacgacatcgaggccatgcgcgccggggtgctgcccccgccaccgcgccacgccagcaccggggccatgcacccactgcgcagcggcttgctcaactccacctgggactccgacctcgtgcgctaccgcaccattagcaagattccccaaatcaccctcaactttgtggacctcaagggcgaccccttcttggcttcgcccaccagtgaccgtgagatcatagcacctaagataaaggagcgaacccacaatgtcactgagaaggtcacccaggtcctgtccctgggcgccgacgtgctgcctgagtacaagctgcaggcaccgcgcatccaccgctggaccatcctgcattacagccccttcaaggccgtgtgggactggctcatcctgctgctggtcatctacacggctgtcttcacaccctactcggctgccttcctgctgaaggagacggaagaaggcccgcctgctaccgagtgtggctacgcctgccagccgctggctgtggtggacctcatcgtggacatcatgttcattgtggacatcctcatcaacttccgcaccacctacgtcaatgccaacgaggaggtggtcagccaccccggccgcatcgccgtccactacttcaagggctggttcctcatcgacatggtggccgccatccccttcgacctgctcatcttcggctctggctctgaggagctgatcgggctgctgaagactgcgcggctgctgcggctggtgcgcgtggcgcggaagctggatcgctactcagagtacggcgcggccgtgctgttcttgctcatgtgcacctttgcgctcatcgcgcactggctagcctgcatctggtacgccatcggcaacatggagcagccacacatggactcacgcatcggctggctgcacaacctgggcgaccagataggcaaaccctacaacagcagcggcctgggcggcccctccatcaaggacaagtatgtgacggcgctctacttcaccttcagcagcctcaccagtgtgggcttcggcaacgtctctcccaacaccaactcagagaagatcttctccatctgcgtcatgctcattggctccctcatgtatgctagcatcttcggcaacgtgtcggccatcatccagcggctgtactcgggcacagcccgctaccacacacagatgctgcgggtgcgggagttcatccgcttccaccagatccccaatcccctgcgccagcgcctcgaggagtacttccagcacgcctggtcctacaccaacggcatcgacatgaacgcggtgctgaagggcttccctgagtgcctgcaggctgacatctgcctgcacctgaaccgctcactgctgcagcactgcaaacccttccgaggggccaccaagggctgccttcgggccctggccatgaagttcaagaccacacatgcaccgccaggggacacactggtgcatgctggggacctgctcaccgccctgtacttcatctcccggggctccatcgagatcctgcggggcgacgtcgtcgtggccatcctggggaagaatgacatctttggggagcctctgaacctgtatgcaaggcctggcaagtcgaacggggatgtgcgggccctcacctactgtgacctacacaagatccatcgggacgacctgctggaggtgctggacatgtaccctgagttctccgaccacttctggtccagcctggagatcaccttcaacctgcgagataccaacatgatcccgggctcccccggcagtacggagttagagggtggcttcagtcggcaacgcaagcgcaagttgtccttccgcaggcgcacggacaaggacacggagcagccaggggaggtgtcggccttggggccgggccgggcgggggcagggccgagtagccggggccggccgggggggccgtggggggagagcccgtccagtggcccctccagccctgagagcagtgaggatgagggcccaggccgcagctccagccccctccgcctggtgcccttctccagccccaggccccccggagagccgccgggtggggagcccctgatggaggactgcgagaagagcagcgacacttgcaaccccctgtcaggcgccttctcaggagtgtccaacattttcagcttctggggggacagtcggggccgccagtaccaggagctccctcgatgccccgcccccacccccagcctcctcaacatccccctctccagcccgggtcggcggccccggggcgacgtggagagcaggctggatgccctccagcgccagctcaacaggctggagacccggctgagtgcagacatggccactgtcctgcagctgctacagaggcagatgacgctggtcccgcccgcctacagtgctgtgaccaccccggggcctggccccacttccacatccccgctgttgcccgtcagccccctccccaccctcaccttggactcgctttctcaggtttcccagttcatggcgtgtgaggagctgcccccgggggccccagagcttccccaagaaggccccacacgacgcctctccctaccgggccagctgggggccctcacctcccagcccctgcacagacacggctcggacccgggcagttagtggggctgcccagtgtggacacgtggctcacccagggatcaaggcgctgctgggccgctccccttggaggccctgctcaggaggccctgaccgtggaaggggagaggaactcgaaagcacagctcctcccccagcccttgggaccatcttctcctgcagtcccctgggccccagtgagaggggcaggggcagggccggcagtaggtggggcctgtggtccccccactgccctgagggcattagctggtctaactgcccggaggcacccggccctgggccttaggcacctcaaggacttttctgctatttactgctcttattgttaaggataataattaaggatcatatgaataattaatgaagatgctgatgactatgaataataaataattatcctgaggaga

SEQ ID NO: 1040 - DNA, 3884 bp, Homo sapiens
  source 1..3884: mol_type = genomic DNA
  misc_feature 1..3884: note = cDNA of KCNH2 gene SNP c.959C>T (p.Ser320Leu)
atgccggtgcggaggggccacgtcgcgccgcagaacaccttcctggacaccatcatccgcaagtttgagggccagagccgtaagttcatcatcgccaacgctcgggtggagaactgcgccgtcatctactgcaacgacggcttctgcgagctgtgcggctactcgcgggccgaggtgatgcagcgaccctgcacctgcgacttcctgcacgggccgcgcacgcagcgccgcgctgccgcgcagatcgcgcaggcactgctgggcgccgaggagcgcaaagtggaaatcgccttctaccggaaagatgggagctgcttcctatgtctggtggatgtggtgcccgtgaagaacgaggatggggctgtcatcatgttcatcctcaatttcgaggtggtgatggagaaggacatggtggggtccccggctcatgacaccaaccaccggggcccccccaccagctggctggccccaggccgcgccaagaccttccgcctgaagctgcccgcgctgctggcgctgacggcccgggagtcgtcggtgcggtcgggcggcgcgggcggcgcgggcgccccgggggccgtggtggtggacgtggacctgacgcccgcggcacccagcagcgagtcgctggccctggacgaagtgacagccatggacaaccacgtggcagggctcgggcccgcggaggagcggcgtgcgctggtgggtcccggctctccgccccgcagcgcgcccggccagctcccatcgccccgggcgcacagcctcaaccccgacgcctcgggctccagctgcagcctggcccggacgcgctcccgagaaagctgcgccagcgtgcgccgcgcctcgtcggccgacgacatcgaggccatgcgcgccggggtgctgcccccgccaccgcgccacgccagcaccggggccatgcacccactgcgcagcggcttgctcaactccaccttggactccgacctcgtgcgctaccgcaccattagcaagattccccaaatcaccctcaactttgtggacctcaagggcgaccccttcttggcttcgcccaccagtgaccgtgagatcatagcacctaagataaaggagcgaacccacaatgtcactgagaaggtcacccaggtcctgtccctgggcgccgacgtgctgcctgagtacaagctgcaggcaccgcgcatccaccgctggaccatcctgcattacagccccttcaaggccgtgtgggactggctcatcctgctgctggtcatctacacggctgtcttcacaccctactcggctgccttcctgctgaaggagacggaagaaggcccgcctgctaccgagtgtggctacgcctgccagccgctggctgtggtggacctcatcgtggacatcatgttcattgtggacatcctcatcaacttccgcaccacctacgtcaatgccaacgaggaggtggtcagccaccccggccgcatcgccgtccactacttcaagggctggttcctcatcgacatggtggccgccatccccttcgacctgctcatcttcggctctggctctgaggagctgatcgggctgctgaagactgcgcggctgctgcggctggtgcgcgtggcgcggaagctggatcgctactcagagtacggcgcggccgtgctgttcttgctcatgtgcacctttgcgctcatcgcgcactggctagcctgcatctggtacgccatcggcaacatggagcagccacacatggactcacgcatcggctggctgcacaacctgggcgaccagataggcaaaccctacaacagcagcggcctgggcggcccctccatcaaggacaagtatgtgacggcgctctacttcaccttcagcagcctcaccagtgtgggcttcggcaacgtctctcccaacaccaactcagagaagatcttctccatctgcgtcatgctcattggctccctcatgtatgctagcatcttcggcaacgtgtcggccatcatccagcggctgtactcgggcacagcccgctaccacacacagatgctgcgggtgcgggagttcatccgcttccaccagatccccaatcccctgcgccagcgcctcgaggagtacttccagcacgcctggtcctacaccaacggcatcgacatgaacgcggtgctgaagggcttccctgagtgcctgcaggctgacatctgcctgcacctgaaccgctcactgctgcagcactgcaaacccttccgaggggccaccaagggctgccttcgggccctggccatgaagttcaagaccacacatgcaccgccaggggacacactggtgcatgctggggacctgctcaccgccctgtacttcatctcccggggctccatcgagatcctgcggggcgacgtcgtcgtggccatcctggggaagaatgacatctttggggagcctctgaacctgtatgcaaggcctggcaagtcgaacggggatgtgcgggccctcacctactgtgacctacacaagatccatcgggacgacctgctggaggtgctggacatgtaccctgagttctccgaccacttctggtccagcctggagatcaccttcaacctgcgagataccaacatgatcccgggctcccccggcagtacggagttagagggtggcttcagtcggcaacgcaagcgcaagttgtccttccgcaggcgcacggacaaggacacggagcagccaggggaggtgtcggccttggggccgggccgggcgggggcagggccgagtagccggggccggccgggggggccgtggggggagagcccgtccagtggcccctccagccctgagagcagtgaggatgagggcccaggccgcagctccagccccctccgcctggtgcccttctccagccccaggccccccggagagccgccgggtggggagcccctgatggaggactgcgagaagagcagcgacacttgcaaccccctgtcaggcgccttctcaggagtgtccaacattttcagcttctggggggacagtcggggccgccagtaccaggagctccctcgatgccccgcccccacccccagcctcctcaacatccccctctccagcccgggtcggcggccccggggcgacgtggagagcaggctggatgccctccagcgccagctcaacaggctggagacccggctgagtgcagacatggccactgtcctgcagctgctacagaggcagatgacgctggtcccgcccgcctacagtgctgtgaccaccccggggcctggccccacttccacatccccgctgttgcccgtcagccccctccccaccctcaccttggactcgctttctcaggtttcccagttcatggcgtgtgaggagctgcccccgggggccccagagcttccccaagaaggccccacacgacgcctctccctaccgggccagctgggggccctcacctcccagcccctgcacagacacggctcggacccgggcagttagtggggctgcccagtgtggacacgtggctcacccagggatcaaggcgctgctgggccgctccccttggaggccctgctcaggaggccctgaccgtggaaggggagaggaactcgaaagcacagctcctcccccagcccttgggaccatcttctcctgcagtcccctgggccccagtgagaggggcaggggcagggccggcagtaggtggggcctgtggtccccccactgccctgagggcattagctggtctaactgcccggaggcacccggccctgggccttaggcacctcaaggacttttctgctatttactgctcttattgttaaggataataattaaggatcatatgaataattaatgaagatgctgatgactatgaataataaataattatcctgaggaga

SEQ ID NO: 1041 - DNA, 3884 bp, Homo sapiens
  source 1..3884: mol_type = genomic DNA
  misc_feature 1..3884: note = cDNA of KCNH2 gene SNP c.95C>T (p.Ala32Val)
atgccggtgcggaggggccacgtcgcgccgcagaacaccttcctggacaccatcatccgcaagtttgagggccagagccgtaagttcatcatcgtcaacgctcgggtggagaactgcgccgtcatctactgcaacgacggcttctgcgagctgtgcggctactcgcgggccgaggtgatgcagcgaccctgcacctgcgacttcctgcacgggccgcgcacgcagcgccgcgctgccgcgcagatcgcgcaggcactgctgggcgccgaggagcgcaaagtggaaatcgccttctaccggaaagatgggagctgcttcctatgtctggtggatgtggtgcccgtgaagaacgaggatggggctgtcatcatgttcatcctcaatttcgaggtggtgatggagaaggacatggtggggtccccggctcatgacaccaaccaccggggcccccccaccagctggctggccccaggccgcgccaagaccttccgcctgaagctgcccgcgctgctggcgctgacggcccgggagtcgtcggtgcggtcgggcggcgcgggcggcgcgggcgccccgggggccgtggtggtggacgtggacctgacgcccgcggcacccagcagcgagtcgctggccctggacgaagtgacagccatggacaaccacgtggcagggctcgggcccgcggaggagcggcgtgcgctggtgggtcccggctctccgccccgcagcgcgcccggccagctcccatcgccccgggcgcacagcctcaaccccgacgcctcgggctccagctgcagcctggcccggacgcgctcccgagaaagctgcgccagcgtgcgccgcgcctcgtcggccgacgacatcgaggccatgcgcgccggggtgctgcccccgccaccgcgccacgccagcaccggggccatgcacccactgcgcagcggcttgctcaactccacctcggactccgacctcgtgcgctaccgcaccattagcaagattccccaaatcaccctcaactttgtggacctcaagggcgaccccttcttggcttcgcccaccagtgaccgtgagatcatagcacctaagataaaggagcgaacccacaatgtcactgagaaggtcacccaggtcctgtccctgggcgccgacgtgctgcctgagtacaagctgcaggcaccgcgcatccaccgctggaccatcctgcattacagccccttcaaggccgtgtgggactggctcatcctgctgctggtcatctacacggctgtcttcacaccctactcggctgccttcctgctgaaggagacggaagaaggcccgcctgctaccgagtgtggctacgcctgccagccgctggctgtggtggacctcatcgtggacatcatgttcattgtggacatcctcatcaacttccgcaccacctacgtcaatgccaacgaggaggtggtcagccaccccggccgcatcgccgtccactacttcaagggctggttcctcatcgacatggtggccgccatccccttcgacctgctcatcttcggctctggctctgaggagctgatcgggctgctgaagactgcgcggctgctgcggctggtgcgcgtggcgcggaagctggatcgctactcagagtacggcgcggccgtgctgttcttgctcatgtgcacctttgcgctcatcgcgcactggctagcctgcatctggtacgccatcggcaacatggagcagccacacatggactcacgcatcggctggctgcacaacctgggcgaccagataggcaaaccctacaacagcagcggcctgggcggcccctccatcaaggacaagtatgtgacggcgctctacttcaccttcagcagcctcaccagtgtgggcttcggcaacgtctctcccaacaccaactcagagaagatcttctccatctgcgtcatgctcattggctccctcatgtatgctagcatcttcggcaacgtgtcggccatcatccagcggctgtactcgggcacagcccgctaccacacacagatgctgcgggtgcgggagttcatccgcttccaccagatccccaatcccctgcgccagcgcctcgaggagtacttccagcacgcctggtcctacaccaacggcatcgacatgaacgcggtgctgaagggcttccctgagtgcctgcaggctgacatctgcctgcacctgaaccgctcactgctgcagcactgcaaacccttccgaggggccaccaagggctgccttcgggccctggccatgaagttcaagaccacacatgcaccgccaggggacacactggtgcatgctggggacctgctcaccgccctgtacttcatctcccggggctccatcgagatcctgcggggcgacgtcgtcgtggccatcctggggaagaatgacatctttggggagcctctgaacctgtatgcaaggcctggcaagtcgaacggggatgtgcgggccctcacctactgtgacctacacaagatccatcgggacgacctgctggaggtgctggacatgtaccctgagttctccgaccacttctggtccagcctggagatcaccttcaacctgcgagataccaacatgatcccgggctcccccggcagtacggagttagagggtggcttcagtcggcaacgcaagcgcaagttgtccttccgcaggcgcacggacaaggacacggagcagccaggggaggtgtcggccttggggccgggccgggcgggggcagggccgagtagccggggccggccgggggggccgtggggggagagcccgtccagtggcccctccagccctgagagcagtgaggatgagggcccaggccgcagctccagccccctccgcctggtgcccttctccagccccaggccccccggagagccgccgggtggggagcccctgatggaggactgcgagaagagcagcgacacttgcaaccccctgtcaggcgccttctcaggagtgtccaacattttcagcttctggggggacagtcggggccgccagtaccaggagctccctcgatgccccgcccccacccccagcctcctcaacatccccctctccagcccgggtcggcggccccggggcgacgtggagagcaggctggatgccctccagcgccagctcaacaggctggagacccggctgagtgcagacatggccactgtcctgcagctgctacagaggcagatgacgctggtcccgcccgcctacagtgctgtgaccaccccggggcctggccccacttccacatccccgctgttgcccgtcagccccctccccaccctcaccttggactcgctttctcaggtttcccagttcatggcgtgtgaggagctgcccccgggggccccagagcttccccaagaaggccccacacgacgcctctccctaccgggccagctgggggccctcacctcccagcccctgcacagacacggctcggacccgggcagttagtggggctgcccagtgtggacacgtggctcacccagggatcaaggcgctgctgggccgctccccttggaggccctgctcaggaggccctgaccgtggaaggggagaggaactcgaaagcacagctcctcccccagcccttgggaccatcttctcctgcagtcccctgggccccagtgagaggggcaggggcagggccggcagtaggtggggcctgtggtccccccactgccctgagggcattagctggtctaactgcccggaggcacccggccctgggccttaggcacctcaaggacttttctgctatttactgctcttattgttaaggataataattaaggatcatatgaataattaatgaagatgctgatgactatgaataataaataattatcctgaggaga

SEQ ID NO: 1042 - DNA, 3884 bp, Homo sapiens
  source 1..3884: mol_type = genomic DNA
  misc_feature 1..3884: note = cDNA of KCNH2 gene SNP c.961G>T (p.Asp321Tyr)
atgccggtgcggaggggccacgtcgcgccgcagaacaccttcctggacaccatcatccgcaagtttgagggccagagccgtaagttcatcatcgccaacgctcgggtggagaactgcgccgtcatctactgcaacgacggcttctgcgagctgtgcggctactcgcgggccgaggtgatgcagcgaccctgcacctgcgacttcctgcacgggccgcgcacgcagcgccgcgctgccgcgcagatcgcgcaggcactgctgggcgccgaggagcgcaaagtggaaatcgccttctaccggaaagatgggagctgcttcctatgtctggtggatgtggtgcccgtgaagaacgaggatggggctgtcatcatgttcatcctcaatttcgaggtggtgatggagaaggacatggtggggtccccggctcatgacaccaaccaccggggcccccccaccagctggctggccccaggccgcgccaagaccttccgcctgaagctgcccgcgctgctggcgctgacggcccgggagtcgtcggtgcggtcgggcggcgcgggcggcgcgggcgccccgggggccgtggtggtggacgtggacctgacgcccgcggcacccagcagcgagtcgctggccctggacgaagtgacagccatggacaaccacgtggcagggctcgggcccgcggaggagcggcgtgcgctggtgggtcccggctctccgccccgcagcgcgcccggccagctcccatcgccccgggcgcacagcctcaaccccgacgcctcgggctccagctgcagcctggcccggacgcgctcccgagaaagctgcgccagcgtgcgccgcgcctcgtcggccgacgacatcgaggccatgcgcgccggggtgctgcccccgccaccgcgccacgccagcaccggggccatgcacccactgcgcagcggcttgctcaactccacctcgtactccgacctcgtgcgctaccgcaccattagcaagattccccaaatcaccctcaactttgtggacctcaagggcgaccccttcttggcttcgcccaccagtgaccgtgagatcatagcacctaagataaaggagcgaacccacaatgtcactgagaaggtcacccaggtcctgtccctgggcgccgacgtgctgcctgagtacaagctgcaggcaccgcgcatccaccgctggaccatcctgcattacagccccttcaaggccgtgtgggactggctcatcctgctgctggtcatctacacggctgtcttcacaccctactcggctgccttcctgctgaaggagacggaagaaggcccgcctgctaccgagtgtggctacgcctgccagccgctggctgtggtggacctcatcgtggacatcatgttcattgtggacatcctcatcaacttccgcaccacctacgtcaatgccaacgaggaggtggtcagccaccccggccgcatcgccgtccactacttcaagggctggttcctcatcgacatggtggccgccatccccttcgacctgctcatcttcggctctggctctgaggagctgatcgggctgctgaagactgcgcggctgctgcggctggtgcgcgtggcgcggaagctggatcgctactcagagtacggcgcggccgtgctgttcttgctcatgtgcacctttgcgctcatcgcgcactggctagcctgcatctggtacgccatcggcaacatggagcagccacacatggactcacgcatcggctggctgcacaacctgggcgaccagataggcaaaccctacaacagcagcggcctgggcggcccctccatcaaggacaagtatgtgacggcgctctacttcaccttcagcagcctcaccagtgtgggcttcggcaacgtctctcccaacaccaactcagagaagatcttctccatctgcgtcatgctcattggctccctcatgtatgctagcatcttcggcaacgtgtcggccatcatccagcggctgtactcgggcacagcccgctaccacacacagatgctgcgggtgcgggagttcatccgcttccaccagatccccaatcccctgcgccagcgcctcgaggagtacttccagcacgcctggtcctacaccaacggcatcgacatgaacgcggtgctgaagggcttccctgagtgcctgcaggctgacatctgcctgcacctgaaccgctcactgctgcagcactgcaaacccttccgaggggccaccaagggctgccttcgggccctggccatgaagttcaagaccacacatgcaccgccaggggacacactggtgcatgctggggacctgctcaccgccctgtacttcatctcccggggctccatcgagatcctgcggggcgacgtcgtcgtggccatcctggggaagaatgacatctttggggagcctctgaacctgtatgcaaggcctggcaagtcgaacggggatgtgcgggccctcacctactgtgacctacacaagatccatcgggacgacctgctggaggtgctggacatgtaccctgagttctccgaccacttctggtccagcctggagatcaccttcaacctgcgagataccaacatgatcccgggctcccccggcagtacggagttagagggtggcttcagtcggcaacgcaagcgcaagttgtccttccgcaggcgcacggacaaggacacggagcagccaggggaggtgtcggccttggggccgggccgggcgggggcagggccgagtagccggggccggccgggggggccgtggggggagagcccgtccagtggcccctccagccctgagagcagtgaggatgagggcccaggccgcagctccagccccctccgcctggtgcccttctccagccccaggccccccggagagccgccgggtggggagcccctgatggaggactgcgagaagagcagcgacacttgcaaccccctgtcaggcgccttctcaggagtgtccaacattttcagcttctggggggacagtcggggccgccagtaccaggagctccctcgatgccccgcccccacccccagcctcctcaacatccccctctccagcccgggtcggcggccccggggcgacgtggagagcaggctggatgccctccagcgccagctcaacaggctggagacccggctgagtgcagacatggccactgtcctgcagctgctacagaggcagatgacgctggtcccgcccgcctacagtgctgtgaccaccccggggcctggccccacttccacatccccgctgttgcccgtcagccccctccccaccctcaccttggactcgctttctcaggtttcccagttcatggcgtgtgaggagctgcccccgggggccccagagcttccccaagaaggccccacacgacgcctctccctaccgggccagctgggggccctcacctcccagcccctgcacagacacggctcggacccgggcagttagtggggctgcccagtgtggacacgtggctcacccagggatcaaggcgctgctgggccgctccccttggaggccctgctcaggaggccctgaccgtggaaggggagaggaactcgaaagcacagctcctcccccagcccttgggaccatcttctcctgcagtcccctgggccccagtgagaggggcaggggcagggccggcagtaggtggggcctgtggtccccccactgccctgagggcattagctggtctaactgcccggaggcacccggccctgggccttaggcacctcaaggacttttctgctatttactgctcttattgttaaggataataattaaggatcatatgaataattaatgaagatgctgatgactatgaataataaataattatcctgaggaga

SEQ ID NO: 1043 - DNA, 3884 bp, Homo sapiens
  source 1..3884: mol_type = genomic DNA
  misc_feature 1..3884: note = cDNA of KCNH2 gene SNP c.967G>A (p.Asp323Asn)
atgccggtgcggaggggccacgtcgcgccgcagaacaccttcctggacaccatcatccgcaagtttgagggccagagccgtaagttcatcatcgccaacgctcgggtggagaactgcgccgtcatctactgcaacgacggcttctgcgagctgtgcggctactcgcgggccgaggtgatgcagcgaccctgcacctgcgacttcctgcacgggccgcgcacgcagcgccgcgctgccgcgcagatcgcgcaggcactgctgggcgccgaggagcgcaaagtggaaatcgccttctaccggaaagatgggagctgcttcctatgtctggtggatgtggtgcccgtgaagaacgaggatggggctgtcatcatgttcatcctcaatttcgaggtggtgatggagaaggacatggtggggtccccggctcatgacaccaaccaccggggcccccccaccagctggctggccccaggccgcgccaagaccttccgcctgaagctgcccgcgctgctggcgctgacggcccgggagtcgtcggtgcggtcgggcggcgcgggcggcgcgggcgccccgggggccgtggtggtggacgtggacctgacgcccgcggcacccagcagcgagtcgctggccctggacgaagtgacagccatggacaaccacgtggcagggctcgggcccgcggaggagcggcgtgcgctggtgggtcccggctctccgccccgcagcgcgcccggccagctcccatcgccccgggcgcacagcctcaaccccgacgcctcgggctccagctgcagcctggcccggacgcgctcccgagaaagctgcgccagcgtgcgccgcgcctcgtcggccgacgacatcgaggccatgcgcgccggggtgctgcccccgccaccgcgccacgccagcaccggggccatgcacccactgcgcagcggcttgctcaactccacctcggactccaacctcgtgcgctaccgcaccattagcaagattccccaaatcaccctcaactttgtggacctcaagggcgaccccttcttggcttcgcccaccagtgaccgtgagatcatagcacctaagataaaggagcgaacccacaatgtcactgagaaggtcacccaggtcctgtccctgggcgccgacgtgctgcctgagtacaagctgcaggcaccgcgcatccaccgctggaccatcctgcattacagccccttcaaggccgtgtgggactggctcatcctgctgctggtcatctacacggctgtcttcacaccctactcggctgccttcctgctgaaggagacggaagaaggcccgcctgctaccgagtgtggctacgcctgccagccgctggctgtggtggacctcatcgtggacatcatgttcattgtggacatcctcatcaacttccgcaccacctacgtcaatgccaacgaggaggtggtcagccaccccggccgcatcgccgtccactacttcaagggctggttcctcatcgacatggtggccgccatccccttcgacctgctcatcttcggctctggctctgaggagctgatcgggctgctgaagactgcgcggctgctgcggctggtgcgcgtggcgcggaagctggatcgctactcagagtacggcgcggccgtgctgttcttgctcatgtgcacctttgcgctcatcgcgcactggctagcctgcatctggtacgccatcggcaacatggagcagccacacatggactcacgcatcggctggctgcacaacctgggcgaccagataggcaaaccctacaacagcagcggcctgggcggcccctccatcaaggacaagtatgtgacggcgctctacttcaccttcagcagcctcaccagtgtgggcttcggcaacgtctctcccaacaccaactcagagaagatcttctccatctgcgtcatgctcattggctccctcatgtatgctagcatcttcggcaacgtgtcggccatcatccagcggctgtactcgggcacagcccgctaccacacacagatgctgcgggtgcgggagttcatccgcttccaccagatccccaatcccctgcgccagcgcctcgaggagtacttccagcacgcctggtcctacaccaacggcatcgacatgaacgcggtgctgaagggcttccctgagtgcctgcaggctgacatctgcctgcacctgaaccgctcactgctgcagcactgcaaacccttccgaggggccaccaagggctgccttcgggccctggccatgaagttcaagaccacacatgcaccgccaggggacacactggtgcatgctggggacctgctcaccgccctgtacttcatctcccggggctccatcgagatcctgcggggcgacgtcgtcgtggccatcctggggaagaatgacatctttggggagcctctgaacctgtatgcaaggcctggcaagtcgaacggggatgtgcgggccctcacctactgtgacctacacaagatccatcgggacgacctgctggaggtgctggacatgtaccctgagttctccgaccacttctggtccagcctggagatcaccttcaacctgcgagataccaacatgatcccgggctcccccggcagtacggagttagagggtggcttcagtcggcaacgcaagcgcaagttgtccttccgcaggcgcacggacaaggacacggagcagccaggggaggtgtcggccttggggccgggccgggcgggggcagggccgagtagccggggccggccgggggggccgtggggggagagcccgtccagtggcccctccagccctgagagcagtgaggatgagggcccaggccgcagctccagccccctccgcctggtgcccttctccagccccaggccccccggagagccgccgggtggggagcccctgatggaggactgcgagaagagcagcgacacttgcaaccccctgtcaggcgccttctcaggagtgtccaacattttcagcttctggggggacagtcggggccgccagtaccaggagctccctcgatgccccgcccccacccccagcctcctcaacatccccctctccagcccgggtcggcggccccggggcgacgtggagagcaggctggatgccctccagcgccagctcaacaggctggagacccggctgagtgcagacatggccactgtcctgcagctgctacagaggcagatgacgctggtcccgcccgcctacagtgctgtgaccaccccggggcctggccccacttccacatccccgctgttgcccgtcagccccctccccaccctcaccttggactcgctttctcaggtttcccagttcatggcgtgtgaggagctgcccccgggggccccagagcttccccaagaaggccccacacgacgcctctccctaccgggccagctgggggccctcacctcccagcccctgcacagacacggctcggacccgggcagttagtggggctgcccagtgtggacacgtggctcacccagggatcaaggcgctgctgggccgctccccttggaggccctgctcaggaggccctgaccgtggaaggggagaggaactcgaaagcacagctcctcccccagcccttgggaccatcttctcctgcagtcccctgggccccagtgagaggggcaggggcagggccggcagtaggtggggcctgtggtccccccactgccctgagggcattagctggtctaactgcccggaggcacccggccctgggccttaggcacctcaaggacttttctgctatttactgctcttattgttaaggataataattaaggatcatatgaataattaatgaagatgctgatgactatgaataataaataattatcctgaggaga

SEQ ID NO: 1044 - DNA, 3884 bp, Homo sapiens
  source 1..3884: mol_type = genomic DNA
  misc_feature 1..3884: note = cDNA of KCNH2 gene SNP c.973G>A (p.Val325Met)
atgccggtgcggaggggccacgtcgcgccgcagaacaccttcctggacaccatcatccgcaagtttgagggccagagccgtaagttcatcatcgccaacgctcgggtggagaactgcgccgtcatctactgcaacgacggcttctgcgagctgtgcggctactcgcgggccgaggtgatgcagcgaccctgcacctgcgacttcctgcacgggccgcgcacgcagcgccgcgctgccgcgcagatcgcgcaggcactgctgggcgccgaggagcgcaaagtggaaatcgccttctaccggaaagatgggagctgcttcctatgtctggtggatgtggtgcccgtgaagaacgaggatggggctgtcatcatgttcatcctcaatttcgaggtggtgatggagaaggacatggtggggtccccggctcatgacaccaaccaccggggcccccccaccagctggctggccccaggccgcgccaagaccttccgcctgaagctgcccgcgctgctggcgctgacggcccgggagtcgtcggtgcggtcgggcggcgcgggcggcgcgggcgccccgggggccgtggtggtggacgtggacctgacgcccgcggcacccagcagcgagtcgctggccctggacgaagtgacagccatggacaaccacgtggcagggctcgggcccgcggaggagcggcgtgcgctggtgggtcccggctctccgccccgcagcgcgcccggccagctcccatcgccccgggcgcacagcctcaaccccgacgcctcgggctccagctgcagcctggcccggacgcgctcccgagaaagctgcgccagcgtgcgccgcgcctcgtcggccgacgacatcgaggccatgcgcgccggggtgctgcccccgccaccgcgccacgccagcaccggggccatgcacccactgcgcagcggcttgctcaactccacctcggactccgacctcatgcgctaccgcaccattagcaagattccccaaatcaccctcaactttgtggacctcaagggcgaccccttcttggcttcgcccaccagtgaccgtgagatcatagcacctaagataaaggagcgaacccacaatgtcactgagaaggtcacccaggtcctgtccctgggcgccgacgtgctgcctgagtacaagctgcaggcaccgcgcatccaccgctggaccatcctgcattacagccccttcaaggccgtgtgggactggctcatcctgctgctggtcatctacacggctgtcttcacaccctactcggctgccttcctgctgaaggagacggaagaaggcccgcctgctaccgagtgtggctacgcctgccagccgctggctgtggtggacctcatcgtggacatcatgttcattgtggacatcctcatcaacttccgcaccacctacgtcaatgccaacgaggaggtggtcagccaccccggccgcatcgccgtccactacttcaagggctggttcctcatcgacatggtggccgccatccccttcgacctgctcatcttcggctctggctctgaggagctgatcgggctgctgaagactgcgcggctgctgcggctggtgcgcgtggcgcggaagctggatcgctactcagagtacggcgcggccgtgctgttcttgctcatgtgcacctttgcgctcatcgcgcactggctagcctgcatctggtacgccatcggcaacatggagcagccacacatggactcacgcatcggctggctgcacaacctgggcgaccagataggcaaaccctacaacagcagcggcctgggcggcccctccatcaaggacaagtatgtgacggcgctctacttcaccttcagcagcctcaccagtgtgggcttcggcaacgtctctcccaacaccaactcagagaagatcttctccatctgcgtcatgctcattggctccctcatgtatgctagcatcttcggcaacgtgtcggccatcatccagcggctgtactcgggcacagcccgctaccacacacagatgctgcgggtgcgggagttcatccgcttccaccagatccccaatcccctgcgccagcgcctcgaggagtacttccagcacgcctggtcctacaccaacggcatcgacatgaacgcggtgctgaagggcttccctgagtgcctgcaggctgacatctgcctgcacctgaaccgctcactgctgcagcactgcaaacccttccgaggggccaccaagggctgccttcgggccctggccatgaagttcaagaccacacatgcaccgccaggggacacactggtgcatgctggggacctgctcaccgccctgtacttcatctcccggggctccatcgagatcctgcggggcgacgtcgtcgtggccatcctggggaagaatgacatctttggggagcctctgaacctgtatgcaaggcctggcaagtcgaacggggatgtgcgggccctcacctactgtgacctacacaagatccatcgggacgacctgctggaggtgctggacatgtaccctgagttctccgaccacttctggtccagcctggagatcaccttcaacctgcgagataccaacatgatcccgggctcccccggcagtacggagttagagggtggcttcagtcggcaacgcaagcgcaagttgtccttccgcaggcgcacggacaaggacacggagcagccaggggaggtgtcggccttggggccgggccgggcgggggcagggccgagtagccggggccggccgggggggccgtggggggagagcccgtccagtggcccctccagccctgagagcagtgaggatgagggcccaggccgcagctccagccccctccgcctggtgcccttctccagccccaggccccccggagagccgccgggtggggagcccctgatggaggactgcgagaagagcagcgacacttgcaaccccctgtcaggcgccttctcaggagtgtccaacattttcagcttctggggggacagtcggggccgccagtaccaggagctccctcgatgccccgcccccacccccagcctcctcaacatccccctctccagcccgggtcggcggccccggggcgacgtggagagcaggctggatgccctccagcgccagctcaacaggctggagacccggctgagtgcagacatggccactgtcctgcagctgctacagaggcagatgacgctggtcccgcccgcctacagtgctgtgaccaccccggggcctggccccacttccacatccccgctgttgcccgtcagccccctccccaccctcaccttggactcgctttctcaggtttcccagttcatggcgtgtgaggagctgcccccgggggccccagagcttccccaagaaggccccacacgacgcctctccctaccgggccagctgggggccctcacctcccagcccctgcacagacacggctcggacccgggcagttagtggggctgcccagtgtggacacgtggctcacccagggatcaaggcgctgctgggccgctccccttggaggccctgctcaggaggccctgaccgtggaaggggagaggaactcgaaagcacagctcctcccccagcccttgggaccatcttctcctgcagtcccctgggccccagtgagaggggcaggggcagggccggcagtaggtggggcctgtggtccccccactgccctgagggcattagctggtctaactgcccggaggcacccggccctgggccttaggcacctcaaggacttttctgctatttactgctcttattgttaaggataataattaaggatcatatgaataattaatgaagatgctgatgactatgaataataaataattatcctgaggaga

SEQ ID NO: 1045 - DNA, 3884 bp, Homo sapiens
  source 1..3884: mol_type = genomic DNA
  misc_feature 1..3884: note = cDNA of KCNH2 gene SNP c.973G>C (p.Val325Leu)
atgccggtgcggaggggccacgtcgcgccgcagaacaccttcctggacaccatcatccgcaagtttgagggccagagccgtaagttcatcatcgccaacgctcgggtggagaactgcgccgtcatctactgcaacgacggcttctgcgagctgtgcggctactcgcgggccgaggtgatgcagcgaccctgcacctgcgacttcctgcacgggccgcgcacgcagcgccgcgctgccgcgcagatcgcgcaggcactgctgggcgccgaggagcgcaaagtggaaatcgccttctaccggaaagatgggagctgcttcctatgtctggtggatgtggtgcccgtgaagaacgaggatggggctgtcatcatgttcatcctcaatttcgaggtggtgatggagaaggacatggtggggtccccggctcatgacaccaaccaccggggcccccccaccagctggctggccccaggccgcgccaagaccttccgcctgaagctgcccgcgctgctggcgctgacggcccgggagtcgtcggtgcggtcgggcggcgcgggcggcgcgggcgccccgggggccgtggtggtggacgtggacctgacgcccgcggcacccagcagcgagtcgctggccctggacgaagtgacagccatggacaaccacgtggcagggctcgggcccgcggaggagcggcgtgcgctggtgggtcccggctctccgccccgcagcgcgcccggccagctcccatcgccccgggcgcacagcctcaaccccgacgcctcgggctccagctgcagcctggcccggacgcgctcccgagaaagctgcgccagcgtgcgccgcgcctcgtcggccgacgacatcgaggccatgcgcgccggggtgctgcccccgccaccgcgccacgccagcaccggggccatgcacccactgcgcagcggcttgctcaactccacctcggactccgacctcctgcgctaccgcaccattagcaagattccccaaatcaccctcaactttgtggacctcaagggcgaccccttcttggcttcgcccaccagtgaccgtgagatcatagcacctaagataaaggagcgaacccacaatgtcactgagaaggtcacccaggtcctgtccctgggcgccgacgtgctgcctgagtacaagctgcaggcaccgcgcatccaccgctggaccatcctgcattacagccccttcaaggccgtgtgggactggctcatcctgctgctggtcatctacacggctgtcttcacaccctactcggctgccttcctgctgaaggagacggaagaaggcccgcctgctaccgagtgtggctacgcctgccagccgctggctgtggtggacctcatcgtggacatcatgttcattgtggacatcctcatcaacttccgcaccacctacgtcaatgccaacgaggaggtggtcagccaccccggccgcatcgccgtccactacttcaagggctggttcctcatcgacatggtggccgccatccccttcgacctgctcatcttcggctctggctctgaggagctgatcgggctgctgaagactgcgcggctgctgcggctggtgcgcgtggcgcggaagctggatcgctactcagagtacggcgcggccgtgctgttcttgctcatgtgcacctttgcgctcatcgcgcactggctagcctgcatctggtacgccatcggcaacatggagcagccacacatggactcacgcatcggctggctgcacaacctgggcgaccagataggcaaaccctacaacagcagcggcctgggcggcccctccatcaaggacaagtatgtgacggcgctctacttcaccttcagcagcctcaccagtgtgggcttcggcaacgtctctcccaacaccaactcagagaagatcttctccatctgcgtcatgctcattggctccctcatgtatgctagcatcttcggcaacgtgtcggccatcatccagcggctgtactcgggcacagcccgctaccacacacagatgctgcgggtgcgggagttcatccgcttccaccagatccccaatcccctgcgccagcgcctcgaggagtacttccagcacgcctggtcctacaccaacggcatcgacatgaacgcggtgctgaagggcttccctgagtgcctgcaggctgacatctgcctgcacctgaaccgctcactgctgcagcactgcaaacccttccgaggggccaccaagggctgccttcgggccctggccatgaagttcaagaccacacatgcaccgccaggggacacactggtgcatgctggggacctgctcaccgccctgtacttcatctcccggggctccatcgagatcctgcggggcgacgtcgtcgtggccatcctggggaagaatgacatctttggggagcctctgaacctgtatgcaaggcctggcaagtcgaacggggatgtgcgggccctcacctactgtgacctacacaagatccatcgggacgacctgctggaggtgctggacatgtaccctgagttctccgaccacttctggtccagcctggagatcaccttcaacctgcgagataccaacatgatcccgggctcccccggcagtacggagttagagggtggcttcagtcggcaacgcaagcgcaagttgtccttccgcaggcgcacggacaaggacacggagcagccaggggaggtgtcggccttggggccgggccgggcgggggcagggccgagtagccggggccggccgggggggccgtggggggagagcccgtccagtggcccctccagccctgagagcagtgaggatgagggcccaggccgcagctccagccccctccgcctggtgcccttctccagccccaggccccccggagagccgccgggtggggagcccctgatggaggactgcgagaagagcagcgacacttgcaaccccctgtcaggcgccttctcaggagtgtccaacattttcagcttctggggggacagtcggggccgccagtaccaggagctccctcgatgccccgcccccacccccagcctcctcaacatccccctctccagcccgggtcggcggccccggggcgacgtggagagcaggctggatgccctccagcgccagctcaacaggctggagacccggctgagtgcagacatggccactgtcctgcagctgctacagaggcagatgacgctggtcccgcccgcctacagtgctgtgaccaccccggggcctggccccacttccacatccccgctgttgcccgtcagccccctccccaccctcaccttggactcgctttctcaggtttcccagttcatggcgtgtgaggagctgcccccgggggccccagagcttccccaagaaggccccacacgacgcctctccctaccgggccagctgggggccctcacctcccagcccctgcacagacacggctcggacccgggcagttagtggggctgcccagtgtggacacgtggctcacccagggatcaaggcgctgctgggccgctccccttggaggccctgctcaggaggccctgaccgtggaaggggagaggaactcgaaagcacagctcctcccccagcccttgggaccatcttctcctgcagtcccctgggccccagtgagaggggcaggggcagggccggcagtaggtggggcctgtggtccccccactgccctgagggcattagctggtctaactgcccggaggcacccggccctgggccttaggcacctcaaggacttttctgctatttactgctcttattgttaaggataataattaaggatcatatgaataattaatgaagatgctgatgactatgaataataaataattatcctgaggaga

SEQ ID NO: 1046 - DNA, 3884 bp, Homo sapiens
  source 1..3884: mol_type = genomic DNA
  misc_feature 1..3884: note = cDNA of KCNH2 gene SNP c.976C>T (p.Arg326Cys)
atgccggtgcggaggggccacgtcgcgccgcagaacaccttcctggacaccatcatccgcaagtttgagggccagagccgtaagttcatcatcgccaacgctcgggtggagaactgcgccgtcatctactgcaacgacggcttctgcgagctgtgcggctactcgcgggccgaggtgatgcagcgaccctgcacctgcgacttcctgcacgggccgcgcacgcagcgccgcgctgccgcgcagatcgcgcaggcactgctgggcgccgaggagcgcaaagtggaaatcgccttctaccggaaagatgggagctgcttcctatgtctggtggatgtggtgcccgtgaagaacgaggatggggctgtcatcatgttcatcctcaatttcgaggtggtgatggagaaggacatggtggggtccccggctcatgacaccaaccaccggggcccccccaccagctggctggccccaggccgcgccaagaccttccgcctgaagctgcccgcgctgctggcgctgacggcccgggagtcgtcggtgcggtcgggcggcgcgggcggcgcgggcgccccgggggccgtggtggtggacgtggacctgacgcccgcggcacccagcagcgagtcgctggccctggacgaagtgacagccatggacaaccacgtggcagggctcgggcccgcggaggagcggcgtgcgctggtgggtcccggctctccgccccgcagcgcgcccggccagctcccatcgccccgggcgcacagcctcaaccccgacgcctcgggctccagctgcagcctggcccggacgcgctcccgagaaagctgcgccagcgtgcgccgcgcctcgtcggccgacgacatcgaggccatgcgcgccggggtgctgcccccgccaccgcgccacgccagcaccggggccatgcacccactgcgcagcggcttgctcaactccacctcggactccgacctcgtgtgctaccgcaccattagcaagattccccaaatcaccctcaactttgtggacctcaagggcgaccccttcttggcttcgcccaccagtgaccgtgagatcatagcacctaagataaaggagcgaacccacaatgtcactgagaaggtcacccaggtcctgtccctgggcgccgacgtgctgcctgagtacaagctgcaggcaccgcgcatccaccgctggaccatcctgcattacagccccttcaaggccgtgtgggactggctcatcctgctgctggtcatctacacggctgtcttcacaccctactcggctgccttcctgctgaaggagacggaagaaggcccgcctgctaccgagtgtggctacgcctgccagccgctggctgtggtggacctcatcgtggacatcatgttcattgtggacatcctcatcaacttccgcaccacctacgtcaatgccaacgaggaggtggtcagccaccccggccgcatcgccgtccactacttcaagggctggttcctcatcgacatggtggccgccatccccttcgacctgctcatcttcggctctggctctgaggagctgatcgggctgctgaagactgcgcggctgctgcggctggtgcgcgtggcgcggaagctggatcgctactcagagtacggcgcggccgtgctgttcttgctcatgtgcacctttgcgctcatcgcgcactggctagcctgcatctggtacgccatcggcaacatggagcagccacacatggactcacgcatcggctggctgcacaacctgggcgaccagataggcaaaccctacaacagcagcggcctgggcggcccctccatcaaggacaagtatgtgacggcgctctacttcaccttcagcagcctcaccagtgtgggcttcggcaacgtctctcccaacaccaactcagagaagatcttctccatctgcgtcatgctcattggctccctcatgtatgctagcatcttcggcaacgtgtcggccatcatccagcggctgtactcgggcacagcccgctaccacacacagatgctgcgggtgcgggagttcatccgcttccaccagatccccaatcccctgcgccagcgcctcgaggagtacttccagcacgcctggtcctacaccaacggcatcgacatgaacgcggtgctgaagggcttccctgagtgcctgcaggctgacatctgcctgcacctgaaccgctcactgctgcagcactgcaaacccttccgaggggccaccaagggctgccttcgggccctggccatgaagttcaagaccacacatgcaccgccaggggacacactggtgcatgctggggacctgctcaccgccctgtacttcatctcccggggctccatcgagatcctgcggggcgacgtcgtcgtggccatcctggggaagaatgacatctttggggagcctctgaacctgtatgcaaggcctggcaagtcgaacggggatgtgcgggccctcacctactgtgacctacacaagatccatcgggacgacctgctggaggtgctggacatgtaccctgagttctccgaccacttctggtccagcctggagatcaccttcaacctgcgagataccaacatgatcccgggctcccccggcagtacggagttagagggtggcttcagtcggcaacgcaagcgcaagttgtccttccgcaggcgcacggacaaggacacggagcagccaggggaggtgtcggccttggggccgggccgggcgggggcagggccgagtagccggggccggccgggggggccgtggggggagagcccgtccagtggcccctccagccctgagagcagtgaggatgagggcccaggccgcagctccagccccctccgcctggtgcccttctccagccccaggccccccggagagccgccgggtggggagcccctgatggaggactgcgagaagagcagcgacacttgcaaccccctgtcaggcgccttctcaggagtgtccaacattttcagcttctggggggacagtcggggccgccagtaccaggagctccctcgatgccccgcccccacccccagcctcctcaacatccccctctccagcccgggtcggcggccccggggcgacgtggagagcaggctggatgccctccagcgccagctcaacaggctggagacccggctgagtgcagacatggccactgtcctgcagctgctacagaggcagatgacgctggtcccgcccgcctacagtgctgtgaccaccccggggcctggccccacttccacatccccgctgttgcccgtcagccccctccccaccctcaccttggactcgctttctcaggtttcccagttcatggcgtgtgaggagctgcccccgggggccccagagcttccccaagaaggccccacacgacgcctctccctaccgggccagctgggggccctcacctcccagcccctgcacagacacggctcggacccgggcagttagtggggctgcccagtgtggacacgtggctcacccagggatcaaggcgctgctgggccgctccccttggaggccctgctcaggaggccctgaccgtggaaggggagaggaactcgaaagcacagctcctcccccagcccttgggaccatcttctcctgcagtcccctgggccccagtgagaggggcaggggcagggccggcagtaggtggggcctgtggtccccccactgccctgagggcattagctggtctaactgcccggaggcacccggccctgggccttaggcacctcaaggacttttctgctatttactgctcttattgttaaggataataattaaggatcatatgaataattaatgaagatgctgatgactatgaataataaataattatcctgaggaga

SEQ ID NO: 1047 - DNA, 3884 bp, Homo sapiens
  source 1..3884: mol_type = genomic DNA
  misc_feature 1..3884: note = cDNA of KCNH2 gene SNP c.977G>A (p.Arg326His)
atgccggtgcggaggggccacgtcgcgccgcagaacaccttcctggacaccatcatccgcaagtttgagggccagagccgtaagttcatcatcgccaacgctcgggtggagaactgcgccgtcatctactgcaacgacggcttctgcgagctgtgcggctactcgcgggccgaggtgatgcagcgaccctgcacctgcgacttcctgcacgggccgcgcacgcagcgccgcgctgccgcgcagatcgcgcaggcactgctgggcgccgaggagcgcaaagtggaaatcgccttctaccggaaagatgggagctgcttcctatgtctggtggatgtggtgcccgtgaagaacgaggatggggctgtcatcatgttcatcctcaatttcgaggtggtgatggagaaggacatggtggggtccccggctcatgacaccaaccaccggggcccccccaccagctggctggccccaggccgcgccaagaccttccgcctgaagctgcccgcgctgctggcgctgacggcccgggagtcgtcggtgcggtcgggcggcgcgggcggcgcgggcgccccgggggccgtggtggtggacgtggacctgacgcccgcggcacccagcagcgagtcgctggccctggacgaagtgacagccatggacaaccacgtggcagggctcgggcccgcggaggagcggcgtgcgctggtgggtcccggctctccgccccgcagcgcgcccggccagctcccatcgccccgggcgcacagcctcaaccccgacgcctcgggctccagctgcagcctggcccggacgcgctcccgagaaagctgcgccagcgtgcgccgcgcctcgtcggccgacgacatcgaggccatgcgcgccggggtgctgcccccgccaccgcgccacgccagcaccggggccatgcacccactgcgcagcggcttgctcaactccacctcggactccgacctcgtgcactaccgcaccattagcaagattccccaaatcaccctcaactttgtggacctcaagggcgaccccttcttggcttcgcccaccagtgaccgtgagatcatagcacctaagataaaggagcgaacccacaatgtcactgagaaggtcacccaggtcctgtccctgggcgccgacgtgctgcctgagtacaagctgcaggcaccgcgcatccaccgctggaccatcctgcattacagccccttcaaggccgtgtgggactggctcatcctgctgctggtcatctacacggctgtcttcacaccctactcggctgccttcctgctgaaggagacggaagaaggcccgcctgctaccgagtgtggctacgcctgccagccgctggctgtggtggacctcatcgtggacatcatgttcattgtggacatcctcatcaacttccgcaccacctacgtcaatgccaacgaggaggtggtcagccaccccggccgcatcgccgtccactacttcaagggctggttcctcatcgacatggtggccgccatccccttcgacctgctcatcttcggctctggctctgaggagctgatcgggctgctgaagactgcgcggctgctgcggctggtgcgcgtggcgcggaagctggatcgctactcagagtacggcgcggccgtgctgttcttgctcatgtgcacctttgcgctcatcgcgcactggctagcctgcatctggtacgccatcggcaacatggagcagccacacatggactcacgcatcggctggctgcacaacctgggcgaccagataggcaaaccctacaacagcagcggcctgggcggcccctccatcaaggacaagtatgtgacggcgctctacttcaccttcagcagcctcaccagtgtgggcttcggcaacgtctctcccaacaccaactcagagaagatcttctccatctgcgtcatgctcattggctccctcatgtatgctagcatcttcggcaacgtgtcggccatcatccagcggctgtactcgggcacagcccgctaccacacacagatgctgcgggtgcgggagttcatccgcttccaccagatccccaatcccctgcgccagcgcctcgaggagtacttccagcacgcctggtcctacaccaacggcatcgacatgaacgcggtgctgaagggcttccctgagtgcctgcaggctgacatctgcctgcacctgaaccgctcactgctgcagcactgcaaacccttccgaggggccaccaagggctgccttcgggccctggccatgaagttcaagaccacacatgcaccgccaggggacacactggtgcatgctggggacctgctcaccgccctgtacttcatctcccggggctccatcgagatcctgcggggcgacgtcgtcgtggccatcctggggaagaatgacatctttggggagcctctgaacctgtatgcaaggcctggcaagtcgaacggggatgtgcgggccctcacctactgtgacctacacaagatccatcgggacgacctgctggaggtgctggacatgtaccctgagttctccgaccacttctggtccagcctggagatcaccttcaacctgcgagataccaacatgatcccgggctcccccggcagtacggagttagagggtggcttcagtcggcaacgcaagcgcaagttgtccttccgcaggcgcacggacaaggacacggagcagccaggggaggtgtcggccttggggccgggccgggcgggggcagggccgagtagccggggccggccgggggggccgtggggggagagcccgtccagtggcccctccagccctgagagcagtgaggatgagggcccaggccgcagctccagccccctccgcctggtgcccttctccagccccaggccccccggagagccgccgggtggggagcccctgatggaggactgcgagaagagcagcgacacttgcaaccccctgtcaggcgccttctcaggagtgtccaacattttcagcttctggggggacagtcggggccgccagtaccaggagctccctcgatgccccgcccccacccccagcctcctcaacatccccctctccagcccgggtcggcggccccggggcgacgtggagagcaggctggatgccctccagcgccagctcaacaggctggagacccggctgagtgcagacatggccactgtcctgcagctgctacagaggcagatgacgctggtcccgcccgcctacagtgctgtgaccaccccggggcctggccccacttccacatccccgctgttgcccgtcagccccctccccaccctcaccttggactcgctttctcaggtttcccagttcatggcgtgtgaggagctgcccccgggggccccagagcttccccaagaaggccccacacgacgcctctccctaccgggccagctgggggccctcacctcccagcccctgcacagacacggctcggacccgggcagttagtggggctgcccagtgtggacacgtggctcacccagggatcaaggcgctgctgggccgctccccttggaggccctgctcaggaggccctgaccgtggaaggggagaggaactcgaaagcacagctcctcccccagcccttgggaccatcttctcctgcagtcccctgggccccagtgagaggggcaggggcagggccggcagtaggtggggcctgtggtccccccactgccctgagggcattagctggtctaactgcccggaggcacccggccctgggccttaggcacctcaaggacttttctgctatttactgctcttattgttaaggataataattaaggatcatatgaataattaatgaagatgctgatgactatgaataataaataattatcctgaggaga

SEQ ID NO: 1048 - DNA, 3884 bp, Homo sapiens
  source 1..3884: mol_type = genomic DNA
  misc_feature 1..3884: note = cDNA of KCNH2 gene SNP c.979T>C (p.Tyr327His)
atgccggtgcggaggggccacgtcgcgccgcagaacaccttcctggacaccatcatccgcaagtttgagggccagagccgtaagttcatcatcgccaacgctcgggtggagaactgcgccgtcatctactgcaacgacggcttctgcgagctgtgcggctactcgcgggccgaggtgatgcagcgaccctgcacctgcgacttcctgcacgggccgcgcacgcagcgccgcgctgccgcgcagatcgcgcaggcactgctgggcgccgaggagcgcaaagtggaaatcgccttctaccggaaagatgggagctgcttcctatgtctggtggatgtggtgcccgtgaagaacgaggatggggctgtcatcatgttcatcctcaatttcgaggtggtgatggagaaggacatggtggggtccccggctcatgacaccaaccaccggggcccccccaccagctggctggccccaggccgcgccaagaccttccgcctgaagctgcccgcgctgctggcgctgacggcccgggagtcgtcggtgcggtcgggcggcgcgggcggcgcgggcgccccgggggccgtggtggtggacgtggacctgacgcccgcggcacccagcagcgagtcgctggccctggacgaagtgacagccatggacaaccacgtggcagggctcgggcccgcggaggagcggcgtgcgctggtgggtcccggctctccgccccgcagcgcgcccggccagctcccatcgccccgggcgcacagcctcaaccccgacgcctcgggctccagctgcagcctggcccggacgcgctcccgagaaagctgcgccagcgtgcgccgcgcctcgtcggccgacgacatcgaggccatgcgcgccggggtgctgcccccgccaccgcgccacgccagcaccggggccatgcacccactgcgcagcggcttgctcaactccacctcggactccgacctcgtgcgccaccgcaccattagcaagattccccaaatcaccctcaactttgtggacctcaagggcgaccccttcttggcttcgcccaccagtgaccgtgagatcatagcacctaagataaaggagcgaacccacaatgtcactgagaaggtcacccaggtcctgtccctgggcgccgacgtgctgcctgagtacaagctgcaggcaccgcgcatccaccgctggaccatcctgcattacagccccttcaaggccgtgtgggactggctcatcctgctgctggtcatctacacggctgtcttcacaccctactcggctgccttcctgctgaaggagacggaagaaggcccgcctgctaccgagtgtggctacgcctgccagccgctggctgtggtggacctcatcgtggacatcatgttcattgtggacatcctcatcaacttccgcaccacctacgtcaatgccaacgaggaggtggtcagccaccccggccgcatcgccgtccactacttcaagggctggttcctcatcgacatggtggccgccatccccttcgacctgctcatcttcggctctggctctgaggagctgatcgggctgctgaagactgcgcggctgctgcggctggtgcgcgtggcgcggaagctggatcgctactcagagtacggcgcggccgtgctgttcttgctcatgtgcacctttgcgctcatcgcgcactggctagcctgcatctggtacgccatcggcaacatggagcagccacacatggactcacgcatcggctggctgcacaacctgggcgaccagataggcaaaccctacaacagcagcggcctgggcggcccctccatcaaggacaagtatgtgacggcgctctacttcaccttcagcagcctcaccagtgtgggcttcggcaacgtctctcccaacaccaactcagagaagatcttctccatctgcgtcatgctcattggctccctcatgtatgctagcatcttcggcaacgtgtcggccatcatccagcggctgtactcgggcacagcccgctaccacacacagatgctgcgggtgcgggagttcatccgcttccaccagatccccaatcccctgcgccagcgcctcgaggagtacttccagcacgcctggtcctacaccaacggcatcgacatgaacgcggtgctgaagggcttccctgagtgcctgcaggctgacatctgcctgcacctgaaccgctcactgctgcagcactgcaaacccttccgaggggccaccaagggctgccttcgggccctggccatgaagttcaagaccacacatgcaccgccaggggacacactggtgcatgctggggacctgctcaccgccctgtacttcatctcccggggctccatcgagatcctgcggggcgacgtcgtcgtggccatcctggggaagaatgacatctttggggagcctctgaacctgtatgcaaggcctggcaagtcgaacggggatgtgcgggccctcacctactgtgacctacacaagatccatcgggacgacctgctggaggtgctggacatgtaccctgagttctccgaccacttctggtccagcctggagatcaccttcaacctgcgagataccaacatgatcccgggctcccccggcagtacggagttagagggtggcttcagtcggcaacgcaagcgcaagttgtccttccgcaggcgcacggacaaggacacggagcagccaggggaggtgtcggccttggggccgggccgggcgggggcagggccgagtagccggggccggccgggggggccgtggggggagagcccgtccagtggcccctccagccctgagagcagtgaggatgagggcccaggccgcagctccagccccctccgcctggtgcccttctccagccccaggccccccggagagccgccgggtggggagcccctgatggaggactgcgagaagagcagcgacacttgcaaccccctgtcaggcgccttctcaggagtgtccaacattttcagcttctggggggacagtcggggccgccagtaccaggagctccctcgatgccccgcccccacccccagcctcctcaacatccccctctccagcccgggtcggcggccccggggcgacgtggagagcaggctggatgccctccagcgccagctcaacaggctggagacccggctgagtgcagacatggccactgtcctgcagctgctacagaggcagatgacgctggtcccgcccgcctacagtgctgtgaccaccccggggcctggccccacttccacatccccgctgttgcccgtcagccccctccccaccctcaccttggactcgctttctcaggtttcccagttcatggcgtgtgaggagctgcccccgggggccccagagcttccccaagaaggccccacacgacgcctctccctaccgggccagctgggggccctcacctcccagcccctgcacagacacggctcggacccgggcagttagtggggctgcccagtgtggacacgtggctcacccagggatcaaggcgctgctgggccgctccccttggaggccctgctcaggaggccctgaccgtggaaggggagaggaactcgaaagcacagctcctcccccagcccttgggaccatcttctcctgcagtcccctgggccccagtgagaggggcaggggcagggccggcagtaggtggggcctgtggtccccccactgccctgagggcattagctggtctaactgcccggaggcacccggccctgggccttaggcacctcaaggacttttctgctatttactgctcttattgttaaggataataattaaggatcatatgaataattaatgaagatgctgatgactatgaataataaataattatcctgaggaga

SEQ ID NO: 1049 - DNA, 3884 bp, Homo sapiens
  source 1..3884: mol_type = genomic DNA
  misc_feature 1..3884: note = cDNA of KCNH2 gene SNP c.980A>G (p.Tyr327Cys)
atgccggtgcggaggggccacgtcgcgccgcagaacaccttcctggacaccatcatccgcaagtttgagggccagagccgtaagttcatcatcgccaacgctcgggtggagaactgcgccgtcatctactgcaacgacggcttctgcgagctgtgcggctactcgcgggccgaggtgatgcagcgaccctgcacctgcgacttcctgcacgggccgcgcacgcagcgccgcgctgccgcgcagatcgcgcaggcactgctgggcgccgaggagcgcaaagtggaaatcgccttctaccggaaagatgggagctgcttcctatgtctggtggatgtggtgcccgtgaagaacgaggatggggctgtcatcatgttcatcctcaatttcgaggtggtgatggagaaggacatggtggggtccccggctcatgacaccaaccaccggggcccccccaccagctggctggccccaggccgcgccaagaccttccgcctgaagctgcccgcgctgctggcgctgacggcccgggagtcgtcggtgcggtcgggcggcgcgggcggcgcgggcgccccgggggccgtggtggtggacgtggacctgacgcccgcggcacccagcagcgagtcgctggccctggacgaagtgacagccatggacaaccacgtggcagggctcgggcccgcggaggagcggcgtgcgctggtgggtcccggctctccgccccgcagcgcgcccggccagctcccatcgccccgggcgcacagcctcaaccccgacgcctcgggctccagctgcagcctggcccggacgcgctcccgagaaagctgcgccagcgtgcgccgcgcctcgtcggccgacgacatcgaggccatgcgcgccggggtgctgcccccgccaccgcgccacgccagcaccggggccatgcacccactgcgcagcggcttgctcaactccacctcggactccgacctcgtgcgctgccgcaccattagcaagattccccaaatcaccctcaactttgtggacctcaagggcgaccccttcttggcttcgcccaccagtgaccgtgagatcatagcacctaagataaaggagcgaacccacaatgtcactgagaaggtcacccaggtcctgtccctgggcgccgacgtgctgcctgagtacaagctgcaggcaccgcgcatccaccgctggaccatcctgcattacagccccttcaaggccgtgtgggactggctcatcctgctgctggtcatctacacggctgtcttcacaccctactcggctgccttcctgctgaaggagacggaagaaggcccgcctgctaccgagtgtggctacgcctgccagccgctggctgtggtggacctcatcgtggacatcatgttcattgtggacatcctcatcaacttccgcaccacctacgtcaatgccaacgaggaggtggtcagccaccccggccgcatcgccgtccactacttcaagggctggttcctcatcgacatggtggccgccatccccttcgacctgctcatcttcggctctggctctgaggagctgatcgggctgctgaagactgcgcggctgctgcggctggtgcgcgtggcgcggaagctggatcgctactcagagtacggcgcggccgtgctgttcttgctcatgtgcacctttgcgctcatcgcgcactggctagcctgcatctggtacgccatcggcaacatggagcagccacacatggactcacgcatcggctggctgcacaacctgggcgaccagataggcaaaccctacaacagcagcggcctgggcggcccctccatcaaggacaagtatgtgacggcgctctacttcaccttcagcagcctcaccagtgtgggcttcggcaacgtctctcccaacaccaactcagagaagatcttctccatctgcgtcatgctcattggctccctcatgtatgctagcatcttcggcaacgtgtcggccatcatccagcggctgtactcgggcacagcccgctaccacacacagatgctgcgggtgcgggagttcatccgcttccaccagatccccaatcccctgcgccagcgcctcgaggagtacttccagcacgcctggtcctacaccaacggcatcgacatgaacgcggtgctgaagggcttccctgagtgcctgcaggctgacatctgcctgcacctgaaccgctcactgctgcagcactgcaaacccttccgaggggccaccaagggctgccttcgggccctggccatgaagttcaagaccacacatgcaccgccaggggacacactggtgcatgctggggacctgctcaccgccctgtacttcatctcccggggctccatcgagatcctgcggggcgacgtcgtcgtggccatcctggggaagaatgacatctttggggagcctctgaacctgtatgcaaggcctggcaagtcgaacggggatgtgcgggccctcacctactgtgacctacacaagatccatcgggacgacctgctggaggtgctggacatgtaccctgagttctccgaccacttctggtccagcctggagatcaccttcaacctgcgagataccaacatgatcccgggctcccccggcagtacggagttagagggtggcttcagtcggcaacgcaagcgcaagttgtccttccgcaggcgcacggacaaggacacggagcagccaggggaggtgtcggccttggggccgggccgggcgggggcagggccgagtagccggggccggccgggggggccgtggggggagagcccgtccagtggcccctccagccctgagagcagtgaggatgagggcccaggccgcagctccagccccctccgcctggtgcccttctccagccccaggccccccggagagccgccgggtggggagcccctgatggaggactgcgagaagagcagcgacacttgcaaccccctgtcaggcgccttctcaggagtgtccaacattttcagcttctggggggacagtcggggccgccagtaccaggagctccctcgatgccccgcccccacccccagcctcctcaacatccccctctccagcccgggtcggcggccccggggcgacgtggagagcaggctggatgccctccagcgccagctcaacaggctggagacccggctgagtgcagacatggccactgtcctgcagctgctacagaggcagatgacgctggtcccgcccgcctacagtgctgtgaccaccccggggcctggccccacttccacatccccgctgttgcccgtcagccccctccccaccctcaccttggactcgctttctcaggtttcccagttcatggcgtgtgaggagctgcccccgggggccccagagcttccccaagaaggccccacacgacgcctctccctaccgggccagctgggggccctcacctcccagcccctgcacagacacggctcggacccgggcagttagtggggctgcccagtgtggacacgtggctcacccagggatcaaggcgctgctgggccgctccccttggaggccctgctcaggaggccctgaccgtggaaggggagaggaactcgaaagcacagctcctcccccagcccttgggaccatcttctcctgcagtcccctgggccccagtgagaggggcaggggcagggccggcagtaggtggggcctgtggtccccccactgccctgagggcattagctggtctaactgcccggaggcacccggccctgggccttaggcacctcaaggacttttctgctatttactgctcttattgttaaggataataattaaggatcatatgaataattaatgaagatgctgatgactatgaataataaataattatcctgaggaga

SEQ ID NO: 1050 - DNA, 3884 bp, Homo sapiens
  source 1..3884: mol_type = genomic DNA
  misc_feature 1..3884: note = cDNA of KCNH2 gene SNP c.982C>T (p.Arg328Cys)
atgccggtgcggaggggccacgtcgcgccgcagaacaccttcctggacaccatcatccgcaagtttgagggccagagccgtaagttcatcatcgccaacgctcgggtggagaactgcgccgtcatctactgcaacgacggcttctgcgagctgtgcggctactcgcgggccgaggtgatgcagcgaccctgcacctgcgacttcctgcacgggccgcgcacgcagcgccgcgctgccgcgcagatcgcgcaggcactgctgggcgccgaggagcgcaaagtggaaatcgccttctaccggaaagatgggagctgcttcctatgtctggtggatgtggtgcccgtgaagaacgaggatggggctgtcatcatgttcatcctcaatttcgaggtggtgatggagaaggacatggtggggtccccggctcatgacaccaaccaccggggcccccccaccagctggctggccccaggccgcgccaagaccttccgcctgaagctgcccgcgctgctggcgctgacggcccgggagtcgtcggtgcggtcgggcggcgcgggcggcgcgggcgccccgggggccgtggtggtggacgtggacctgacgcccgcggcacccagcagcgagtcgctggccctggacgaagtgacagccatggacaaccacgtggcagggctcgggcccgcggaggagcggcgtgcgctggtgggtcccggctctccgccccgcagcgcgcccggccagctcccatcgccccgggcgcacagcctcaaccccgacgcctcgggctccagctgcagcctggcccggacgcgctcccgagaaagctgcgccagcgtgcgccgcgcctcgtcggccgacgacatcgaggccatgcgcgccggggtgctgcccccgccaccgcgccacgccagcaccggggccatgcacccactgcgcagcggcttgctcaactccacctcggactccgacctcgtgcgctactgcaccattagcaagattccccaaatcaccctcaactttgtggacctcaagggcgaccccttcttggcttcgcccaccagtgaccgtgagatcatagcacctaagataaaggagcgaacccacaatgtcactgagaaggtcacccaggtcctgtccctgggcgccgacgtgctgcctgagtacaagctgcaggcaccgcgcatccaccgctggaccatcctgcattacagccccttcaaggccgtgtgggactggctcatcctgctgctggtcatctacacggctgtcttcacaccctactcggctgccttcctgctgaaggagacggaagaaggcccgcctgctaccgagtgtggctacgcctgccagccgctggctgtggtggacctcatcgtggacatcatgttcattgtggacatcctcatcaacttccgcaccacctacgtcaatgccaacgaggaggtggtcagccaccccggccgcatcgccgtccactacttcaagggctggttcctcatcgacatggtggccgccatccccttcgacctgctcatcttcggctctggctctgaggagctgatcgggctgctgaagactgcgcggctgctgcggctggtgcgcgtggcgcggaagctggatcgctactcagagtacggcgcggccgtgctgttcttgctcatgtgcacctttgcgctcatcgcgcactggctagcctgcatctggtacgccatcggcaacatggagcagccacacatggactcacgcatcggctggctgcacaacctgggcgaccagataggcaaaccctacaacagcagcggcctgggcggcccctccatcaaggacaagtatgtgacggcgctctacttcaccttcagcagcctcaccagtgtgggcttcggcaacgtctctcccaacaccaactcagagaagatcttctccatctgcgtcatgctcattggctccctcatgtatgctagcatcttcggcaacgtgtcggccatcatccagcggctgtactcgggcacagcccgctaccacacacagatgctgcgggtgcgggagttcatccgcttccaccagatccccaatcccctgcgccagcgcctcgaggagtacttccagcacgcctggtcctacaccaacggcatcgacatgaacgcggtgctgaagggcttccctgagtgcctgcaggctgacatctgcctgcacctgaaccgctcactgctgcagcactgcaaacccttccgaggggccaccaagggctgccttcgggccctggccatgaagttcaagaccacacatgcaccgccaggggacacactggtgcatgctggggacctgctcaccgccctgtacttcatctcccggggctccatcgagatcctgcggggcgacgtcgtcgtggccatcctggggaagaatgacatctttggggagcctctgaacctgtatgcaaggcctggcaagtcgaacggggatgtgcgggccctcacctactgtgacctacacaagatccatcgggacgacctgctggaggtgctggacatgtaccctgagttctccgaccacttctggtccagcctggagatcaccttcaacctgcgagataccaacatgatcccgggctcccccggcagtacggagttagagggtggcttcagtcggcaacgcaagcgcaagttgtccttccgcaggcgcacggacaaggacacggagcagccaggggaggtgtcggccttggggccgggccgggcgggggcagggccgagtagccggggccggccgggggggccgtggggggagagcccgtccagtggcccctccagccctgagagcagtgaggatgagggcccaggccgcagctccagccccctccgcctggtgcccttctccagccccaggccccccggagagccgccgggtggggagcccctgatggaggactgcgagaagagcagcgacacttgcaaccccctgtcaggcgccttctcaggagtgtccaacattttcagcttctggggggacagtcggggccgccagtaccaggagctccctcgatgccccgcccccacccccagcctcctcaacatccccctctccagcccgggtcggcggccccggggcgacgtggagagcaggctggatgccctccagcgccagctcaacaggctggagacccggctgagtgcagacatggccactgtcctgcagctgctacagaggcagatgacgctggtcccgcccgcctacagtgctgtgaccaccccggggcctggccccacttccacatccccgctgttgcccgtcagccccctccccaccctcaccttggactcgctttctcaggtttcccagttcatggcgtgtgaggagctgcccccgggggccccagagcttccccaagaaggccccacacgacgcctctccctaccgggccagctgggggccctcacctcccagcccctgcacagacacggctcggacccgggcagttagtggggctgcccagtgtggacacgtggctcacccagggatcaaggcgctgctgggccgctccccttggaggccctgctcaggaggccctgaccgtggaaggggagaggaactcgaaagcacagctcctcccccagcccttgggaccatcttctcctgcagtcccctgggccccagtgagaggggcaggggcagggccggcagtaggtggggcctgtggtccccccactgccctgagggcattagctggtctaactgcccggaggcacccggccctgggccttaggcacctcaaggacttttctgctatttactgctcttattgttaaggataataattaaggatcatatgaataattaatgaagatgctgatgactatgaataataaataattatcctgaggaga

SEQ ID NO: 1051 - DNA, 3884 bp, Homo sapiens
  source 1..3884: mol_type = genomic DNA
  misc_feature 1..3884: note = cDNA of KCNH2 gene SNP c.983G>A (p.Arg328His)
atgccggtgcggaggggccacgtcgcgccgcagaacaccttcctggacaccatcatccgcaagtttgagggccagagccgtaagttcatcatcgccaacgctcgggtggagaactgcgccgtcatctactgcaacgacggcttctgcgagctgtgcggctactcgcgggccgaggtgatgcagcgaccctgcacctgcgacttcctgcacgggccgcgcacgcagcgccgcgctgccgcgcagatcgcgcaggcactgctgggcgccgaggagcgcaaagtggaaatcgccttctaccggaaagatgggagctgcttcctatgtctggtggatgtggtgcccgtgaagaacgaggatggggctgtcatcatgttcatcctcaatttcgaggtggtgatggagaaggacatggtggggtccccggctcatgacaccaaccaccggggcccccccaccagctggctggccccaggccgcgccaagaccttccgcctgaagctgcccgcgctgctggcgctgacggcccgggagtcgtcggtgcggtcgggcggcgcgggcggcgcgggcgccccgggggccgtggtggtggacgtggacctgacgcccgcggcacccagcagcgagtcgctggccctggacgaagtgacagccatggacaaccacgtggcagggctcgggcccgcggaggagcggcgtgcgctggtgggtcccggctctccgccccgcagcgcgcccggccagctcccatcgccccgggcgcacagcctcaaccccgacgcctcgggctccagctgcagcctggcccggacgcgctcccgagaaagctgcgccagcgtgcgccgcgcctcgtcggccgacgacatcgaggccatgcgcgccggggtgctgcccccgccaccgcgccacgccagcaccggggccatgcacccactgcgcagcggcttgctcaactccacctcggactccgacctcgtgcgctaccacaccattagcaagattccccaaatcaccctcaactttgtggacctcaagggcgaccccttcttggcttcgcccaccagtgaccgtgagatcatagcacctaagataaaggagcgaacccacaatgtcactgagaaggtcacccaggtcctgtccctgggcgccgacgtgctgcctgagtacaagctgcaggcaccgcgcatccaccgctggaccatcctgcattacagccccttcaaggccgtgtgggactggctcatcctgctgctggtcatctacacggctgtcttcacaccctactcggctgccttcctgctgaaggagacggaagaaggcccgcctgctaccgagtgtggctacgcctgccagccgctggctgtggtggacctcatcgtggacatcatgttcattgtggacatcctcatcaacttccgcaccacctacgtcaatgccaacgaggaggtggtcagccaccccggccgcatcgccgtccactacttcaagggctggttcctcatcgacatggtggccgccatccccttcgacctgctcatcttcggctctggctctgaggagctgatcgggctgctgaagactgcgcggctgctgcggctggtgcgcgtggcgcggaagctggatcgctactcagagtacggcgcggccgtgctgttcttgctcatgtgcacctttgcgctcatcgcgcactggctagcctgcatctggtacgccatcggcaacatggagcagccacacatggactcacgcatcggctggctgcacaacctgggcgaccagataggcaaaccctacaacagcagcggcctgggcggcccctccatcaaggacaagtatgtgacggcgctctacttcaccttcagcagcctcaccagtgtgggcttcggcaacgtctctcccaacaccaactcagagaagatcttctccatctgcgtcatgctcattggctccctcatgtatgctagcatcttcggcaacgtgtcggccatcatccagcggctgtactcgggcacagcccgctaccacacacagatgctgcgggtgcgggagttcatccgcttccaccagatccccaatcccctgcgccagcgcctcgaggagtacttccagcacgcctggtcctacaccaacggcatcgacatgaacgcggtgctgaagggcttccctgagtgcctgcaggctgacatctgcctgcacctgaaccgctcactgctgcagcactgcaaacccttccgaggggccaccaagggctgccttcgggccctggccatgaagttcaagaccacacatgcaccgccaggggacacactggtgcatgctggggacctgctcaccgccctgtacttcatctcccggggctccatcgagatcctgcggggcgacgtcgtcgtggccatcctggggaagaatgacatctttggggagcctctgaacctgtatgcaaggcctggcaagtcgaacggggatgtgcgggccctcacctactgtgacctacacaagatccatcgggacgacctgctggaggtgctggacatgtaccctgagttctccgaccacttctggtccagcctggagatcaccttcaacctgcgagataccaacatgatcccgggctcccccggcagtacggagttagagggtggcttcagtcggcaacgcaagcgcaagttgtccttccgcaggcgcacggacaaggacacggagcagccaggggaggtgtcggccttggggccgggccgggcgggggcagggccgagtagccggggccggccgggggggccgtggggggagagcccgtccagtggcccctccagccctgagagcagtgaggatgagggcccaggccgcagctccagccccctccgcctggtgcccttctccagccccaggccccccggagagccgccgggtggggagcccctgatggaggactgcgagaagagcagcgacacttgcaaccccctgtcaggcgccttctcaggagtgtccaacattttcagcttctggggggacagtcggggccgccagtaccaggagctccctcgatgccccgcccccacccccagcctcctcaacatccccctctccagcccgggtcggcggccccggggcgacgtggagagcaggctggatgccctccagcgccagctcaacaggctggagacccggctgagtgcagacatggccactgtcctgcagctgctacagaggcagatgacgctggtcccgcccgcctacagtgctgtgaccaccccggggcctggccccacttccacatccccgctgttgcccgtcagccccctccccaccctcaccttggactcgctttctcaggtttcccagttcatggcgtgtgaggagctgcccccgggggccccagagcttccccaagaaggccccacacgacgcctctccctaccgggccagctgggggccctcacctcccagcccctgcacagacacggctcggacccgggcagttagtggggctgcccagtgtggacacgtggctcacccagggatcaaggcgctgctgggccgctccccttggaggccctgctcaggaggccctgaccgtggaaggggagaggaactcgaaagcacagctcctcccccagcccttgggaccatcttctcctgcagtcccctgggccccagtgagaggggcaggggcagggccggcagtaggtggggcctgtggtccccccactgccctgagggcattagctggtctaactgcccggaggcacccggccctgggccttaggcacctcaaggacttttctgctatttactgctcttattgttaaggataataattaaggatcatatgaataattaatgaagatgctgatgactatgaataataaataattatcctgaggaga

SEQ ID NO: 1052 - DNA, 3884 bp, Homo sapiens
  source 1..3884: mol_type = genomic DNA
  misc_feature 1..3884: note = cDNA of KCNH2 gene SNP c.985A>G (p.Thr329Ala)
atgccggtgcggaggggccacgtcgcgccgcagaacaccttcctggacaccatcatccgcaagtttgagggccagagccgtaagttcatcatcgccaacgctcgggtggagaactgcgccgtcatctactgcaacgacggcttctgcgagctgtgcggctactcgcgggccgaggtgatgcagcgaccctgcacctgcgacttcctgcacgggccgcgcacgcagcgccgcgctgccgcgcagatcgcgcaggcactgctgggcgccgaggagcgcaaagtggaaatcgccttctaccggaaagatgggagctgcttcctatgtctggtggatgtggtgcccgtgaagaacgaggatggggctgtcatcatgttcatcctcaatttcgaggtggtgatggagaaggacatggtggggtccccggctcatgacaccaaccaccggggcccccccaccagctggctggccccaggccgcgccaagaccttccgcctgaagctgcccgcgctgctggcgctgacggcccgggagtcgtcggtgcggtcgggcggcgcgggcggcgcgggcgccccgggggccgtggtggtggacgtggacctgacgcccgcggcacccagcagcgagtcgctggccctggacgaagtgacagccatggacaaccacgtggcagggctcgggcccgcggaggagcggcgtgcgctggtgggtcccggctctccgccccgcagcgcgcccggccagctcccatcgccccgggcgcacagcctcaaccccgacgcctcgggctccagctgcagcctggcccggacgcgctcccgagaaagctgcgccagcgtgcgccgcgcctcgtcggccgacgacatcgaggccatgcgcgccggggtgctgcccccgccaccgcgccacgccagcaccggggccatgcacccactgcgcagcggcttgctcaactccacctcggactccgacctcgtgcgctaccgcgccattagcaagattccccaaatcaccctcaactttgtggacctcaagggcgaccccttcttggcttcgcccaccagtgaccgtgagatcatagcacctaagataaaggagcgaacccacaatgtcactgagaaggtcacccaggtcctgtccctgggcgccgacgtgctgcctgagtacaagctgcaggcaccgcgcatccaccgctggaccatcctgcattacagccccttcaaggccgtgtgggactggctcatcctgctgctggtcatctacacggctgtcttcacaccctactcggctgccttcctgctgaaggagacggaagaaggcccgcctgctaccgagtgtggctacgcctgccagccgctggctgtggtggacctcatcgtggacatcatgttcattgtggacatcctcatcaacttccgcaccacctacgtcaatgccaacgaggaggtggtcagccaccccggccgcatcgccgtccactacttcaagggctggttcctcatcgacatggtggccgccatccccttcgacctgctcatcttcggctctggctctgaggagctgatcgggctgctgaagactgcgcggctgctgcggctggtgcgcgtggcgcggaagctggatcgctactcagagtacggcgcggccgtgctgttcttgctcatgtgcacctttgcgctcatcgcgcactggctagcctgcatctggtacgccatcggcaacatggagcagccacacatggactcacgcatcggctggctgcacaacctgggcgaccagataggcaaaccctacaacagcagcggcctgggcggcccctccatcaaggacaagtatgtgacggcgctctacttcaccttcagcagcctcaccagtgtgggcttcggcaacgtctctcccaacaccaactcagagaagatcttctccatctgcgtcatgctcattggctccctcatgtatgctagcatcttcggcaacgtgtcggccatcatccagcggctgtactcgggcacagcccgctaccacacacagatgctgcgggtgcgggagttcatccgcttccaccagatccccaatcccctgcgccagcgcctcgaggagtacttccagcacgcctggtcctacaccaacggcatcgacatgaacgcggtgctgaagggcttccctgagtgcctgcaggctgacatctgcctgcacctgaaccgctcactgctgcagcactgcaaacccttccgaggggccaccaagggctgccttcgggccctggccatgaagttcaagaccacacatgcaccgccaggggacacactggtgcatgctggggacctgctcaccgccctgtacttcatctcccggggctccatcgagatcctgcggggcgacgtcgtcgtggccatcctggggaagaatgacatctttggggagcctctgaacctgtatgcaaggcctggcaagtcgaacggggatgtgcgggccctcacctactgtgacctacacaagatccatcgggacgacctgctggaggtgctggacatgtaccctgagttctccgaccacttctggtccagcctggagatcaccttcaacctgcgagataccaacatgatcccgggctcccccggcagtacggagttagagggtggcttcagtcggcaacgcaagcgcaagttgtccttccgcaggcgcacggacaaggacacggagcagccaggggaggtgtcggccttggggccgggccgggcgggggcagggccgagtagccggggccggccgggggggccgtggggggagagcccgtccagtggcccctccagccctgagagcagtgaggatgagggcccaggccgcagctccagccccctccgcctggtgcccttctccagccccaggccccccggagagccgccgggtggggagcccctgatggaggactgcgagaagagcagcgacacttgcaaccccctgtcaggcgccttctcaggagtgtccaacattttcagcttctggggggacagtcggggccgccagtaccaggagctccctcgatgccccgcccccacccccagcctcctcaacatccccctctccagcccgggtcggcggccccggggcgacgtggagagcaggctggatgccctccagcgccagctcaacaggctggagacccggctgagtgcagacatggccactgtcctgcagctgctacagaggcagatgacgctggtcccgcccgcctacagtgctgtgaccaccccggggcctggccccacttccacatccccgctgttgcccgtcagccccctccccaccctcaccttggactcgctttctcaggtttcccagttcatggcgtgtgaggagctgcccccgggggccccagagcttccccaagaaggccccacacgacgcctctccctaccgggccagctgggggccctcacctcccagcccctgcacagacacggctcggacccgggcagttagtggggctgcccagtgtggacacgtggctcacccagggatcaaggcgctgctgggccgctccccttggaggccctgctcaggaggccctgaccgtggaaggggagaggaactcgaaagcacagctcctcccccagcccttgggaccatcttctcctgcagtcccctgggccccagtgagaggggcaggggcagggccggcagtaggtggggcctgtggtccccccactgccctgagggcattagctggtctaactgcccggaggcacccggccctgggccttaggcacctcaaggacttttctgctatttactgctcttattgttaaggataataattaaggatcatatgaataattaatgaagatgctgatgactatgaataataaataattatcctgaggaga

SEQ ID NO: 1053 - DNA, 3884 bp, Homo sapiens
  source 1..3884: mol_type = genomic DNA
  misc_feature 1..3884: note = cDNA of KCNH2 gene SNP c.98A>C (p.Asn33Thr)
atgccggtgcggaggggccacgtcgcgccgcagaacaccttcctggacaccatcatccgcaagtttgagggccagagccgtaagttcatcatcgccaccgctcgggtggagaactgcgccgtcatctactgcaacgacggcttctgcgagctgtgcggctactcgcgggccgaggtgatgcagcgaccctgcacctgcgacttcctgcacgggccgcgcacgcagcgccgcgctgccgcgcagatcgcgcaggcactgctgggcgccgaggagcgcaaagtggaaatcgccttctaccggaaagatgggagctgcttcctatgtctggtggatgtggtgcccgtgaagaacgaggatggggctgtcatcatgttcatcctcaatttcgaggtggtgatggagaaggacatggtggggtccccggctcatgacaccaaccaccggggcccccccaccagctggctggccccaggccgcgccaagaccttccgcctgaagctgcccgcgctgctggcgctgacggcccgggagtcgtcggtgcggtcgggcggcgcgggcggcgcgggcgccccgggggccgtggtggtggacgtggacctgacgcccgcggcacccagcagcgagtcgctggccctggacgaagtgacagccatggacaaccacgtggcagggctcgggcccgcggaggagcggcgtgcgctggtgggtcccggctctccgccccgcagcgcgcccggccagctcccatcgccccgggcgcacagcctcaaccccgacgcctcgggctccagctgcagcctggcccggacgcgctcccgagaaagctgcgccagcgtgcgccgcgcctcgtcggccgacgacatcgaggccatgcgcgccggggtgctgcccccgccaccgcgccacgccagcaccggggccatgcacccactgcgcagcggcttgctcaactccacctcggactccgacctcgtgcgctaccgcaccattagcaagattccccaaatcaccctcaactttgtggacctcaagggcgaccccttcttggcttcgcccaccagtgaccgtgagatcatagcacctaagataaaggagcgaacccacaatgtcactgagaaggtcacccaggtcctgtccctgggcgccgacgtgctgcctgagtacaagctgcaggcaccgcgcatccaccgctggaccatcctgcattacagccccttcaaggccgtgtgggactggctcatcctgctgctggtcatctacacggctgtcttcacaccctactcggctgccttcctgctgaaggagacggaagaaggcccgcctgctaccgagtgtggctacgcctgccagccgctggctgtggtggacctcatcgtggacatcatgttcattgtggacatcctcatcaacttccgcaccacctacgtcaatgccaacgaggaggtggtcagccaccccggccgcatcgccgtccactacttcaagggctggttcctcatcgacatggtggccgccatccccttcgacctgctcatcttcggctctggctctgaggagctgatcgggctgctgaagactgcgcggctgctgcggctggtgcgcgtggcgcggaagctggatcgctactcagagtacggcgcggccgtgctgttcttgctcatgtgcacctttgcgctcatcgcgcactggctagcctgcatctggtacgccatcggcaacatggagcagccacacatggactcacgcatcggctggctgcacaacctgggcgaccagataggcaaaccctacaacagcagcggcctgggcggcccctccatcaaggacaagtatgtgacggcgctctacttcaccttcagcagcctcaccagtgtgggcttcggcaacgtctctcccaacaccaactcagagaagatcttctccatctgcgtcatgctcattggctccctcatgtatgctagcatcttcggcaacgtgtcggccatcatccagcggctgtactcgggcacagcccgctaccacacacagatgctgcgggtgcgggagttcatccgcttccaccagatccccaatcccctgcgccagcgcctcgaggagtacttccagcacgcctggtcctacaccaacggcatcgacatgaacgcggtgctgaagggcttccctgagtgcctgcaggctgacatctgcctgcacctgaaccgctcactgctgcagcactgcaaacccttccgaggggccaccaagggctgccttcgggccctggccatgaagttcaagaccacacatgcaccgccaggggacacactggtgcatgctggggacctgctcaccgccctgtacttcatctcccggggctccatcgagatcctgcggggcgacgtcgtcgtggccatcctggggaagaatgacatctttggggagcctctgaacctgtatgcaaggcctggcaagtcgaacggggatgtgcgggccctcacctactgtgacctacacaagatccatcgggacgacctgctggaggtgctggacatgtaccctgagttctccgaccacttctggtccagcctggagatcaccttcaacctgcgagataccaacatgatcccgggctcccccggcagtacggagttagagggtggcttcagtcggcaacgcaagcgcaagttgtccttccgcaggcgcacggacaaggacacggagcagccaggggaggtgtcggccttggggccgggccgggcgggggcagggccgagtagccggggccggccgggggggccgtggggggagagcccgtccagtggcccctccagccctgagagcagtgaggatgagggcccaggccgcagctccagccccctccgcctggtgcccttctccagccccaggccccccggagagccgccgggtggggagcccctgatggaggactgcgagaagagcagcgacacttgcaaccccctgtcaggcgccttctcaggagtgtccaacattttcagcttctggggggacagtcggggccgccagtaccaggagctccctcgatgccccgcccccacccccagcctcctcaacatccccctctccagcccgggtcggcggccccggggcgacgtggagagcaggctggatgccctccagcgccagctcaacaggctggagacccggctgagtgcagacatggccactgtcctgcagctgctacagaggcagatgacgctggtcccgcccgcctacagtgctgtgaccaccccggggcctggccccacttccacatccccgctgttgcccgtcagccccctccccaccctcaccttggactcgctttctcaggtttcccagttcatggcgtgtgaggagctgcccccgggggccccagagcttccccaagaaggccccacacgacgcctctccctaccgggccagctgggggccctcacctcccagcccctgcacagacacggctcggacccgggcagttagtggggctgcccagtgtggacacgtggctcacccagggatcaaggcgctgctgggccgctccccttggaggccctgctcaggaggccctgaccgtggaaggggagaggaactcgaaagcacagctcctcccccagcccttgggaccatcttctcctgcagtcccctgggccccagtgagaggggcaggggcagggccggcagtaggtggggcctgtggtccccccactgccctgagggcattagctggtctaactgcccggaggcacccggccctgggccttaggcacctcaaggacttttctgctatttactgctcttattgttaaggataataattaaggatcatatgaataattaatgaagatgctgatgactatgaataataaataattatcctgaggaga

SEQ ID NO: 1054 - DNA, 3884 bp, Homo sapiens
  source 1..3884: mol_type = genomic DNA
  misc_feature 1..3884: note = cDNA of KCNH2 gene SNP c.995A>G (p.Lys332Arg)
atgccggtgcggaggggccacgtcgcgccgcagaacaccttcctggacaccatcatccgcaagtttgagggccagagccgtaagttcatcatcgccaacgctcgggtggagaactgcgccgtcatctactgcaacgacggcttctgcgagctgtgcggctactcgcgggccgaggtgatgcagcgaccctgcacctgcgacttcctgcacgggccgcgcacgcagcgccgcgctgccgcgcagatcgcgcaggcactgctgggcgccgaggagcgcaaagtggaaatcgccttctaccggaaagatgggagctgcttcctatgtctggtggatgtggtgcccgtgaagaacgaggatggggctgtcatcatgttcatcctcaatttcgaggtggtgatggagaaggacatggtggggtccccggctcatgacaccaaccaccggggcccccccaccagctggctggccccaggccgcgccaagaccttccgcctgaagctgcccgcgctgctggcgctgacggcccgggagtcgtcggtgcggtcgggcggcgcgggcggcgcgggcgccccgggggccgtggtggtggacgtggacctgacgcccgcggcacccagcagcgagtcgctggccctggacgaagtgacagccatggacaaccacgtggcagggctcgggcccgcggaggagcggcgtgcgctggtgggtcccggctctccgccccgcagcgcgcccggccagctcccatcgccccgggcgcacagcctcaaccccgacgcctcgggctccagctgcagcctggcccggacgcgctcccgagaaagctgcgccagcgtgcgccgcgcctcgtcggccgacgacatcgaggccatgcgcgccggggtgctgcccccgccaccgcgccacgccagcaccggggccatgcacccactgcgcagcggcttgctcaactccacctcggactccgacctcgtgcgctaccgcaccattagcaggattccccaaatcaccctcaactttgtggacctcaagggcgaccccttcttggcttcgcccaccagtgaccgtgagatcatagcacctaagataaaggagcgaacccacaatgtcactgagaaggtcacccaggtcctgtccctgggcgccgacgtgctgcctgagtacaagctgcaggcaccgcgcatccaccgctggaccatcctgcattacagccccttcaaggccgtgtgggactggctcatcctgctgctggtcatctacacggctgtcttcacaccctactcggctgccttcctgctgaaggagacggaagaaggcccgcctgctaccgagtgtggctacgcctgccagccgctggctgtggtggacctcatcgtggacatcatgttcattgtggacatcctcatcaacttccgcaccacctacgtcaatgccaacgaggaggtggtcagccaccccggccgcatcgccgtccactacttcaagggctggttcctcatcgacatggtggccgccatccccttcgacctgctcatcttcggctctggctctgaggagctgatcgggctgctgaagactgcgcggctgctgcggctggtgcgcgtggcgcggaagctggatcgctactcagagtacggcgcggccgtgctgttcttgctcatgtgcacctttgcgctcatcgcgcactggctagcctgcatctggtacgccatcggcaacatggagcagccacacatggactcacgcatcggctggctgcacaacctgggcgaccagataggcaaaccctacaacagcagcggcctgggcggcccctccatcaaggacaagtatgtgacggcgctctacttcaccttcagcagcctcaccagtgtgggcttcggcaacgtctctcccaacaccaactcagagaagatcttctccatctgcgtcatgctcattggctccctcatgtatgctagcatcttcggcaacgtgtcggccatcatccagcggctgtactcgggcacagcccgctaccacacacagatgctgcgggtgcgggagttcatccgcttccaccagatccccaatcccctgcgccagcgcctcgaggagtacttccagcacgcctggtcctacaccaacggcatcgacatgaacgcggtgctgaagggcttccctgagtgcctgcaggctgacatctgcctgcacctgaaccgctcactgctgcagcactgcaaacccttccgaggggccaccaagggctgccttcgggccctggccatgaagttcaagaccacacatgcaccgccaggggacacactggtgcatgctggggacctgctcaccgccctgtacttcatctcccggggctccatcgagatcctgcggggcgacgtcgtcgtggccatcctggggaagaatgacatctttggggagcctctgaacctgtatgcaaggcctggcaagtcgaacggggatgtgcgggccctcacctactgtgacctacacaagatccatcgggacgacctgctggaggtgctggacatgtaccctgagttctccgaccacttctggtccagcctggagatcaccttcaacctgcgagataccaacatgatcccgggctcccccggcagtacggagttagagggtggcttcagtcggcaacgcaagcgcaagttgtccttccgcaggcgcacggacaaggacacggagcagccaggggaggtgtcggccttggggccgggccgggcgggggcagggccgagtagccggggccggccgggggggccgtggggggagagcccgtccagtggcccctccagccctgagagcagtgaggatgagggcccaggccgcagctccagccccctccgcctggtgcccttctccagccccaggccccccggagagccgccgggtggggagcccctgatggaggactgcgagaagagcagcgacacttgcaaccccctgtcaggcgccttctcaggagtgtccaacattttcagcttctggggggacagtcggggccgccagtaccaggagctccctcgatgccccgcccccacccccagcctcctcaacatccccctctccagcccgggtcggcggccccggggcgacgtggagagcaggctggatgccctccagcgccagctcaacaggctggagacccggctgagtgcagacatggccactgtcctgcagctgctacagaggcagatgacgctggtcccgcccgcctacagtgctgtgaccaccccggggcctggccccacttccacatccccgctgttgcccgtcagccccctccccaccctcaccttggactcgctttctcaggtttcccagttcatggcgtgtgaggagctgcccccgggggccccagagcttccccaagaaggccccacacgacgcctctccctaccgggccagctgggggccctcacctcccagcccctgcacagacacggctcggacccgggcagttagtggggctgcccagtgtggacacgtggctcacccagggatcaaggcgctgctgggccgctccccttggaggccctgctcaggaggccctgaccgtggaaggggagaggaactcgaaagcacagctcctcccccagcccttgggaccatcttctcctgcagtcccctgggccccagtgagaggggcaggggcagggccggcagtaggtggggcctgtggtccccccactgccctgagggcattagctggtctaactgcccggaggcacccggccctgggccttaggcacctcaaggacttttctgctatttactgctcttattgttaaggataataattaaggatcatatgaataattaatgaagatgctgatgactatgaataataaataattatcctgaggaga

SEQ ID NO: 1055 - DNA, 23 bp, Homo sapiens
  source 1..23: mol_type = genomic DNA
  misc_feature 1..23: note = Target sequence 5'-3'
catcccggccgcctacaagccgg

SEQ ID NO: 1056 - DNA, 23 bp, Homo sapiens
  source 1..23: mol_type = genomic DNA
  misc_feature 1..23: note = Target sequence 5'-3'
gcattaacccttccgcggccggg

SEQ ID NO: 1057 - DNA, 23 bp, Homo sapiens
  source 1..23: mol_type = genomic DNA
  misc_feature 1..23: note = Target sequence 5'-3'
cgcgcgcccgaccttcccattgg

SEQ ID NO: 1058 - DNA, 23 bp, Homo sapiens
  source 1..23: mol_type = genomic DNA
  misc_feature 1..23: note = Target sequence 5'-3'
gcgccgcattaacccttccgcgg

SEQ ID NO: 1059 - DNA, 23 bp, Homo sapiens
  source 1..23: mol_type = genomic DNA
  misc_feature 1..23: note = Target sequence 5'-3'
tctgggcgcgcgagtcccagggg

SEQ ID NO: 1060 - DNA, 23 bp, Homo sapiens
  source 1..23: mol_type = genomic DNA
  misc_feature 1..23: note = Target sequence 5'-3'
ttagtcgctaatctggggtgggg

SEQ ID NO: 1061 - DNA, 23 bp, Homo sapiens
  source 1..23: mol_type = genomic DNA
  misc_feature 1..23: note = Target sequence 5'-3'
actcgcgcgcccagaagaggggg

SEQ ID NO: 1062 - DNA, 23 bp, Homo sapiens
  source 1..23: mol_type = genomic DNA
  misc_feature 1..23: note = Target sequence 5'-3'
actcggcgcggctcagccaatgg

SEQ ID NO: 1063 - DNA, 23 bp, Homo sapiens
  source 1..23: mol_type = genomic DNA
  misc_feature 1..23: note = Target sequence 5'-3'
ggtttcttagtcgctaatctggg

SEQ ID NO: 1064 - DNA, 23 bp, Homo sapiens
  source 1..23: mol_type = genomic DNA
  misc_feature 1..23: note = Target sequence 5'-3'
cgttgggggagcactcggcgcgg

SEQ ID NO: 1065 - DNA, 23 bp, Homo sapiens
  source 1..23: mol_type = genomic DNA
  misc_feature 1..23: note = Target sequence 5'-3'
tagtcgctaatctggggtggggg

SEQ ID NO: 1066 - DNA, 23 bp, Homo sapiens
  source 1..23: mol_type = genomic DNA
  misc_feature 1..23: note = Target sequence 5'-3'
cggccgcggaagggttaatgcgg

SEQ ID NO: 1067 - DNA, 23 bp, Homo sapiens
  source 1..23: mol_type = genomic DNA
  misc_feature 1..23: note = Target sequence 5'-3'
gtttcttagtcgctaatctgggg

SEQ ID NO: 1068 - DNA, 23 bp, Homo sapiens
  source 1..23: mol_type = genomic DNA
  misc_feature 1..23: note = Target sequence 5'-3'
atgggaaggtcgggcgcgcgcgg

SEQ ID NO: 1069 - DNA, 23 bp, Homo sapiens
  source 1..23: mol_type = genomic DNA
  misc_feature 1..23: note = Target sequence 5'-3'
tgccatggccggcttgtaggcgg

SEQ ID NO: 1070 - DNA, 23 bp, Homo sapiens
  source 1..23: mol_type = genomic DNA
  misc_feature 1..23: note = Target sequence 5'-3'
aaggtcgggcgcgcgcggtgggg

SEQ ID NO: 1071 - DNA, 23 bp, Homo sapiens
  source 1..23: mol_type = genomic DNA
  misc_feature 1..23: note = Target sequence 5'-3'
gcgcggctcagccaatgggaagg

SEQ ID NO: 1072 - DNA, 23 bp, Homo sapiens
  source 1..23: mol_type = genomic DNA
  misc_feature 1..23: note = Target sequence 5'-3'
gcaggggaaaccgtgaggacagg

SEQ ID NO: 1073 - DNA, 23 bp, Homo sapiens
  source 1..23: mol_type = genomic DNA
  misc_feature 1..23: note = Target sequence 5'-3'
gacagccgctccagcgcccgcgg

SEQ ID NO: 1074 - DNA, 23 bp, Homo sapiens
  source 1..23: mol_type = genomic DNA
  misc_feature 1..23: note = Target sequence 5'-3'
cgctctgccaaggagcccctggg

SEQ ID NO: 1075 - DNA, 23 bp, Homo sapiens
  source 1..23: mol_type = genomic DNA
  misc_feature 1..23: note = Target sequence 5'-3'
aagagggggaagggacccttagg

SEQ ID NO: 1076 - DNA, 23 bp, Homo sapiens
  source 1..23: mol_type = genomic DNA
  misc_feature 1..23: note = Target sequence 5'-3'
aaccgtgaggacaggtgccatgg

SEQ ID NO: 1077 - DNA, 23 bp, Homo sapiens
  source 1..23: mol_type = genomic DNA
  misc_feature 1..23: note = Target sequence 5'-3'
gctgtcggcgcggtggcaggcgg

SEQ ID NO: 1078 - DNA, 23 bp, Homo sapiens
  source 1..23: mol_type = genomic DNA
  misc_feature 1..23: note = Target sequence 5'-3'
cgcgagtcccaggggctccttgg

SEQ ID NO: 1079 - DNA, 23 bp, Homo sapiens
  source 1..23: mol_type = genomic DNA
  misc_feature 1..23: note = Target sequence 5'-3'
cagagcgaggggctggcgttggg

SEQ ID NO: 1080 - DNA, 23 bp, Homo sapiens
  source 1..23: mol_type = genomic DNA
  misc_feature 1..23: note = Target sequence 5'-3'
tggagcggctgtcggcgcggtgg

SEQ ID NO: 1081 - DNA, 23 bp, Homo sapiens
  source 1..23: mol_type = genomic DNA
  misc_feature 1..23: note = Target sequence 5'-3'
cttaggcaggggaaaccgtgagg

SEQ ID NO: 1082 - DNA, 23 bp, Homo sapiens
  source 1..23: mol_type = genomic DNA
  misc_feature 1..23: note = Target sequence 5'-3'
gccagcccctcgctctgccaagg

SEQ ID NO: 1083 - DNA, 23 bp, Homo sapiens
  source 1..23: mol_type = genomic DNA
  misc_feature 1..23: note = Target sequence 5'-3'
ctcgggcagcgcctgcggctcgg

SEQ ID NO: 1084 - DNA, 23 bp, Homo sapiens
  source 1..23: mol_type = genomic DNA
  misc_feature 1..23: note = Target sequence 5'-3'
tggaatcccttcccccatcccgg

SEQ ID NO: 1085 - DNA, 23 bp, Homo sapiens
  source 1..23: mol_type = genomic DNA
  misc_feature 1..23: note = Target sequence 5'-3'
gggaagggacccttaggcagggg

SEQ ID NO: 1086 - DNA, 23 bp, Homo sapiens
  source 1..23: mol_type = genomic DNA
  misc_feature 1..23: note = Target sequence 5'-3'
caggagtccggggctcgggcggg

SEQ ID NO: 1087 - DNA, 23 bp, Homo sapiens
  source 1..23: mol_type = genomic DNA
  misc_feature 1..23: note = Target sequence 5'-3'
gagcgaggggctggcgttggggg

SEQ ID NO: 1088 - DNA, 23 bp, Homo sapiens
  source 1..23: mol_type = genomic DNA
  misc_feature 1..23: note = Target sequence 5'-3'
aggcggccgggatgggggaaggg

SEQ ID NO: 1089 - DNA, 23 bp, Homo sapiens
  source 1..23: mol_type = genomic DNA
  misc_feature 1..23: note = Target sequence 5'-3'
aggcgggagccaggagtccgggg

SEQ ID NO: 1090 - DNA, 23 bp, Homo sapiens
  source 1..23: mol_type = genomic DNA
  misc_feature 1..23: note = Target sequence 5'-3'
gggtcccttccccctcttctggg

SEQ ID NO: 1091 - DNA, 23 bp, Homo sapiens
  source 1..23: mol_type = genomic DNA
  misc_feature 1..23: note = Target sequence 5'-3'
gagccaggagtccggggctcggg

SEQ ID NO: 1092 - DNA, 23 bp, Homo sapiens
  source 1..23: mol_type = genomic DNA
  misc_feature 1..23: note = Target sequence 5'-3'
gggggagagggcggtgctgcggg

SEQ ID NO: 1093 - DNA, 23 bp, Homo sapiens
  source 1..23: mol_type = genomic DNA
  misc_feature 1..23: note = Target sequence 5'-3'
ggcgggatgggggggggagaggg

SEQ ID NO: 1094 - DNA, 23 bp, Homo sapiens
  source 1..23: mol_type = genomic DNA
  misc_feature 1..23: note = Target sequence 5'-3'
gggatgggggggggagagggcgg

SEQ ID NO: 1095 - DNA, 14645 bp, synthetic construct
  source 1..14645: mol_type = other DNA
  misc_feature 1..14645: note = Encodes the Sp nuclease dead Cas9
ttgtacaaagtggttgatatccagcacagtggcggccgctcgagtctagagggcccgcggttcgaatacccatacgacgtcccagactacgcttagtaatgattaattaaactagaaattctaccgggtaggggaggcgcttttcccaaggcagtctggagtaacccacccaagatctggcctccgcgccgggttttggcgcctcccgcgggcgcccccctcctcacggcgagcgctgccacgtcagacgaagggcgcagcgagcgtcctgatccttccgcccggacgctcaggacagcggcccgctgctcataagactcggccttagaaccccagtatcagcagaaggacattttaggacgggacttgggtgactctagggcactggttttctttccagagagcggaacaggcgaggaaaagtagtcccttctcggcgattctgcggagggatctccgtggggcggtgaacgccgatgattatataaggacgcgccgggtgtggcacagctagttccgtcgcagccgggatttgggtcgcggttcttgtttgtggatcgctgtgatcgtcacttggtgagtagcgggctgctgggctggccggggctttcgtggccgccgggccgctcggtgggacggaagcgtgtggagagaccgccaagggctgtagtctgggtccgcgagcaaggttgccctgaactgggggttggggggagcgcagcaaaatggcggctgttcccgagtcttgaatggaagacgcttgtgaggcgggctgtgaggtcgttgaaacaaggtggggggcatggtgggcggcaagaacccaaggtcttgaggccttcgctaatgcgggaaagctcttattcgggtgagatgggctggggcaccatctggggaccctgacgtgaagtttgtcactgactggagaactcggtttgtcgtctgttgcgggggcggcagttatggcggtgccgttgggcagtgcacccgtacctttgggagcgcgcgccctcgtcgtgtcgtgacgtcacccgttctgttggcttataatgcagggtggggccacctgccggtaggtgtgcggtaggcttttctccgtcgcaggacgcagggttcgggcctagggtaggctctcctgaatcgacaggcgccggacctctggtgaggggagggataagtgaggcgtcagtttctttggtcggttttatgtacctatcttcttaagtagctgaagctccggttttgaactatgcgctcggggttggcgagtgtgttttgtgaagttttttaggcaccttttgaaatgtaatcatttgggtcaatatgtaattttcagtgttagactagtaaattgtccgctaaattctggccgtttttggcttttttgttagacgaagcttggtaccgagctcggatctccaccccgtaccggtcctgcagtcgaattcaccatgtctagactggacaagagcaaagtcataaacggagctctggaattactcaatggtgtcggtatcgaaggcctgacgacaaggaaactcgctcaaaagctgggagttgagcagcctaccctgtactggcacgtgaagaacaagcgggccctgctcgatgccctgccaatcgagatgctggacaggcatcatacccacttctgccccctggaaggcgagtcatggcaagactttctgcggaacaacgccaagtcataccgctgtgctctcctctcacatcgcgacggggctaaagtgcatctcggcacccgcccaacagagaaacagtacgaaaccctggaaaatcagctcgcgttcctgtgtcagcaaggcttctccctggagaacgcactgtacgctctgtccgccgtgggccactttacactgggctgcgtattggaggaacaggagcatcaagtagcaaaagaggaaagagagacacctaccaccgattctatgcccccacttctgagacaagcaattgagctgttcgaccggcagggagccgaacctgccttccttttcggcctggaactaatcatatgtggcctggagaaacagctaaagtgcgaaagcggcgggccgaccgacgcccttgacgattttgacttagacatgctcccagccgatgcccttgacgactttgaccttgatatgctgcctgctgacgctcttgacgattttgaccttgacatgctccccgggtaactaagtaaggatccgcggccgcactagaggaattccgcccctccccccccccccccctaacgttactggccgaagccgcttggaataaggccggtgtgcgtttgtctatatgttattttccaccatattgccgtcttttggcaatgtgagggcccggaaacctggccctgtcttcttgacgagcattcctaggggtctttcccctctcgccaaaggaatgcaaggtctgttgaatgtcgtgaaggaagcagttcctctggaagcttcttgaagacaaacaacgtctgtagcgaccctttgcaggcagcggaaccccccacctggcgacaggtgcctctgcggccaaaagccacgtgtataagatacacctgcaaaggcggcacaaccccagtgccacgttgtgagttggatagttgtggaaagagtcaaatggctctcctcaagcgtattcaacaaggggctgaaggatgcccagaaggtaccccattgtatgggatctgatctggggcctcggtgcacatgctttacatgtgtttagtcgaggttaaaaaaacgtctaggccccccgaaccacggggacgtggttttcctttgaaaaacacgatgataagcttaccggtccaccatgattgaacaagatggattgcacgcaggttctccggccgcttgggtggagaggctattcggctatgactgggcacaacagacaatcggctgctctgatgccgccgtgttccggctgtcagcgcaggggcgcccggttctttttgtcaagaccgacctgtccggtgccctgaatgaactgcaagacgaggcagcgcggctatcgtggctggccacgacgggcgttccttgcgcagctgtgctcgacgttgtcactgaagcgggaagggactggctgctattgggcgaagtgccggggcaggatctcctgtcatctcaccttgctcctgccgagaaagtatccatcatggctgatgcaatgcggcggctgcatacgcttgatccggctacctgcccattcgaccaccaagcgaaacatcgcatcgagcgagcacgtactcggatggaagccggtcttgtcgatcaggatgatctggacgaagagcatcaggggctcgcgccagccgaactgttcgccaggctcaaggcgagcatgcccgacggcgaggatctcgtcgtgacccatggcgatgcctgcttgccgaatatcatggtggaaaatggccgcttttctggattcatcgactgtggccggctgggtgtggcggaccgctatcaggacatagcgttggctacccgtgatattgctgaagagcttggcggcgaatgggctgaccgcttcctcgtgctttacggtatcgccgctcccgattcgcagcgcatcgccttctatcgccttcttgacgagttcttctgatgtacaagtaaagcggccgcgactctagatcataatcagccataccacatttgtagaggttttacttgctttaaaaaacctcccacacctccccctgaacctgaaacataaaatgaatgcaattgttgttgtttagtccctcccaattcgatatcaagcttatcgcgatagatcctaatcaacctctggattacaaaatttgtgaaagattgactggtattcttaactatgttgctccttttacgctatgtggatacgctgctttaatgcctttgtatcatgctattgcttcccgtatggctttcattttctcctccttgtataaatcctggttgctgtctctttatgaggagttgtggcccgttgtcaggcaacgtggcgtggtgtgcactgtgtttgctgacgcaacccccactggttggggcattgccaccacctgtcagctcctttccgggactttcgctttccccctccctattgccacggcggaactcatcgccgcctgccttgcccgctgctggacaggggctcggctgttgggcactgacaattccgtggtgttgtcggggaaatcatcgtcctttccttggctgctcgcctgtgttgccacctggattctgcgcgggacgtccttctgctacgtcccttcggccctcaatccagcggaccttccttcccgcggcctgctgccggctctgcggcctcttccgcgtcttcgccttcgccctcagacgagtcggatctccctttgggccgcctccccgcctgagatcctttaagaccaatgacttacaaggcagctgtagatcttagccactttttaaaagaaaaggggggactggaagggctaattcactcccaacgaagacaagatctgctttttgcttgtactgggtctctctggttagaccagatctgagcctgggagctctctggctaactagggaacccactgcttaagcctcaataaagcttgccttgagtgcttcaagtagtgtgtgcccgtctgttgtgtgactctggtaactagagatccctcagacccttttagtcagtgtggaaaatctctagcagtagtagttcatgtcatcttattattcagtatttataacttgcaaagaaatgaatatcagagagtgagaggcccgggttaattaaggaaagggctagatcattcttgaagacgaaagggcctcgtgatacgcctatttttataggttaatgtcatgataataatggtttcttagacgtcaggtggcacttttcggggaaatgtgcgcggaacccctatttgtttatttttctaaatacattcaaatatgtatccgctcatgagacaataaccctgataaatgcttcaataatattgaaaaaggaagagtatgagtattcaacatttccgtgtcgcccttattcccttttttgcggcattttgccttcctgtttttgctcacccagaaacgctggtgaaagtaaaagatgctgaagatcagttgggtgcacgagtgggttacatcgaactggatctcaacagcggtaagatccttgagagttttcgccccgaagaacgttttccaatgatgagcacttttaaagttctgctatgtggcgcggtattatcccgtgttgacgccgggcaagagcaactcggtcgccgcatacactattctcagaatgacttggttgagtactcaccagtcacagaaaagcatcttacggatggcatgacagtaagagaattatgcagtgctgccataaccatgagtgataacactgcggccaacttacttctgacaacgatcggaggaccgaaggagctaaccgcttttttgcacaacatgggggatcatgtaactcgccttgatcgttgggaaccggagctgaatgaagccataccaaacgacgagcgtgacaccacgatgcctgtagcaatggcaacaacgttgcgcaaactattaactggcgaactacttactctagcttcccggcaacaattaatagactggatggaggcggataaagttgcaggaccacttctgcgctcggcccttccggctggctggtttattgctgataaatctggagccggtgagcgtgggtctcgcggtatcattgcagcactggggccagatggtaagccctcccgtatcgtagttatctacacgacggggagtcaggcaactatggatgaacgaaatagacagatcgctgagataggtgcctcactgattaagcattggtaactgtcagaccaagtttactcatatatactttagattgatttaaaacttcatttttaatttaaaaggatctaggtgaagatcctttttgataatctcatgaccaaaatcccttaacgtgagttttcgttccactgagcgtcagaccccgtagaaaagatcaaaggatcttcttgagatcctttttttctgcgcgtaatctgctgcttgcaaacaaaaaaaccaccgctaccagcggtggtttgtttgccggatcaagagctaccaactctttttccgaaggtaactggcttcagcagagcgcagataccaaatactgttcttctagtgtagccgtagttaggccaccacttcaagaactctgtagcaccgcctacatacctcgctctgctaatcctgttaccagtggctgctgccagtggcgataagtcgtgtcttaccgggttggactcaagacgatagttaccggataaggcgcagcggtcgggctgaacggggggttcgtgcacacagcccagcttggagcgaacgacctacaccgaactgagatacctacagcgtgagctatgagaaagcgccacgcttcccgaagggagaaaggcggacaggtatccggtaagcggcagggtcggaacaggagagcgcacgagggagcttccagggggaaacgcctggtatctttatagtcctgtcgggtttcgccacctctgacttgagcgtcgatttttgtgatgctcgtcaggggggcggagcctatggaaaaacgccagcaacgcggcctttttacggttcctggccttttgctggccttttgctcacatgttctttcctgcgttatcccctgattctgtggataaccgtattaccgcctttgagtgagctgataccgctcgccgcagccgaacgaccgagcgcagcgagtcagtgagcgaggaagcggaagagcgcccaatacgcaaaccgcctctccccgcgcgttggccgattcattaatgcagcaagctcatggctgactaattttttttatttatgcagaggccgaggccgcctcggcctctgagctattccagaagtagtgaggaggcttttttggaggcctaggcttttgcaaaaagctccccgtggcacgacaggtttcccgactggaaagcgggcagtgagcgcaacgcaattaatgtgagttagctcactcattaggcaccccaggctttacactttatgcttccggctcgtatgttgtgtggaattgtgagcggataacaatttcacacaggaaacagctatgacatgattacgaatttcacaaataaagcatttttttcactgcattctagttgtggtttgtccaaactcatcaatgtatcttatcatgtctggatcaactggataactcaagctaaccaaaatcatcccaaacttcccaccccataccctattaccactgccaattacctgtggtttcatttactctaaacctgtgattcctctgaattattttcattttaaagaaattgtatttgttaaatatgtactacaaacttagtagttggaagggctaattcactcccaaagaagacaagatatccttgatctgtggatctaccacacacaaggctacttccctgattagcagaactacacaccagggccaggggtcagatatccactgacctttggatggtgctacaagctagtaccagttgagccagataaggtagaagaggccaataaaggagagaacaccagcttgttacaccctgtgagcctgcatgggatggatgacccggagagagaagtgttagagtggaggtttgacagccgcctagcatttcatcacgtggcccgagagctgcatccggagtacttcaagaactgctgatatcgagcttgctacaagggactttccgctggggactttccagggaggcgtggcctgggcgggactggggagtggcgagccctcagatcctgcatataagcagctgctttttgcctgtactgggtctctctggttagaccagatctgagcctgggagctctctggctaactagggaacccactgcttaagcctcaataaagcttgccttgagtgcttcaagtagtgtgtgcccgtctgttgtgtgactctggtaactagagatccctcagacccttttagtcagtgtggaaaatctctagcagtggcgcccgaacagggacttgaaagcgaaagggaaaccagaggagctctctcgacgcaggactcggcttgctgaagcgcgcacggcaagaggcgaggggcggcgactggtgagtacgccaaaaattttgactagcggaggctagaaggagagagatgggtgcgagagcgtcagtattaagcgggggagaattagatcgcgatgggaaaaaattcggttaaggccagggggaaagaaaaaatataaattaaaacatatagtatgggcaagcagggagctagaacgattcgcagttaatcctggcctgttagaaacatcagaaggctgtagacaaatactgggacagctacaaccatcccttcagacaggatcagaagaacttagatcattatataatacagtagcaaccctctattgtgtgcatcaaaggatagagataaaagacaccaaggaagctttagacaagatagaggaagagcaaaacaaaagtaagaccaccgcacagcaagcggccggccgctgatcttcagacctggaggaggagatatgagggacaattggagaagtgaattatataaatataaagtagtaaaaattgaaccattaggagtagcacccaccaaggcaaagagaagagtggtgcagagagaaaaaagagcagtgggaataggagctttgttccttgggttcttgggagcagcaggaagcactatgggcgcagcgtcaatgacgctgacggtacaggccagacaattattgtctggtatagtgcagcagcagaacaatttgctgagggctattgaggcgcaacagcatctgttgcaactcacagtctggggcatcaagcagctccaggcaagaatcctggctgtggaaagatacctaaaggatcaacagctcctggggatttggggttgctctggaaaactcatttgcaccactgctgtgccttggaatgctagttggagtaataaatctctggaacagatttggaatcacacgacctggatggagtgggacagagaaattaacaattacacaagcttaatacactccttaattgaagaatcgcaaaaccagcaagaaaagaatgaacaagaattattggaattagataaatgggcaagtttgtggaattggtttaacataacaaattggctgtggtatataaaattattcataatgatagtaggaggcttggtaggtttaagaatagtttttgctgtactttctatagtgaatagagttaggcagggatattcaccattatcgtttcagacccacctcccaaccccgaggggacccgacaggcccgaaggaatagaagaagaaggtggagagagagacagagacagatccattcgattagtgaacggatctcgacggtatcgccgaattcacaaatggcagtattcatccacaattttaaaagaaaaggggggattggggggtacagtgcaggggaaagaatagtagacataatagcaacagacatacaaactaaagaattacaaaaacaaattacaaaaattcaaaattttcgggtttattacagggacagcagagatccagtttggactaggatcctttaccactccctatcagtgatagagaaaagtgaaagtcgagtttaccactccctatcagtgatagagaaaagtgaaagtcgagtttaccactccctatcagtgatagagaaaagtgaaagtcgagtttaccactccctatcagtgatagagaaaagtgaaagtcgagtttaccactccctatcagtgatagagaaaagtgaaagtcgagtttaccactccctatcagtgatagagaaaagtgaaagtcgagtttaccactccctatcagtgatagagaaaagtgaaagtcgagctcggtacccgggtcgaggtaggcgtgtacggtgggaggcctatataagcagagctcgtttagtgaaccgtcagatcgcctggagacgccatccacgctgttttgacctccatagaagacaccgggaccgatccagcctccgcggccccgaactagtccagtgtggtggaattctgcagatatcaacaagtttgtacaaaaaagcaggctggcgccaccatggacaagaagtactccattgggctcgctatcggtaccaacagcgtcggctgggccgtcattacggacgagtacaaggtgccgagcaaaaaattcaaagttctgggcaataccgatcgccacagcataaagaagaacctcattggagccctcctgttcgactccggggagacggccgaagccacgcggctcaaaagaacagcacggcgcagatatacccgcagaaagaatcggatctgctacctgcaggagatctttagtaatgagatggctaaggtggatgactctttcttccataggctggaggagtcctttttggtggaggaggataaaaagcacgagcgccacccaatctttggcaatatcgtggacgaggtggcgtaccatgaaaagtacccaaccatatatcatctgaggaagaagctggtagacagtactgataaggctgacttgcggttgatctatctcgcgctggcgcacatgatcaaatttcggggacacttcctcatcgagggggacctgaacccagacaacagcgatgtcgacaaactctttatccaactggttcagacttacaatcagcttttcgaggagaacccgatcaacgcatccggcgttgacgccaaagcaatcctgagcgctaggctgtccaaatcccggcggctcgaaaacctcatcgcacagctccctggggagaagaagaacggcctgtttggtaatcttatcgccctgtcactcgggctgacccccaactttaaatctaacttcgacctggccgaagatgccaagctgcaactgagcaaagacacctacgatgatgatctcgacaatctgctggcccagatcggcgaccagtacgcagacctttttttggcggcaaagaacctgtcagacgccattctgctgagtgatattctgcgagtgaacacggagatcaccaaagctccgctgagcgctagtatgatcaagcgctatgatgagcaccaccaagacttgactttgctgaaggcccttgtcagacagcaactgcctgagaagtacaaggaaattttcttcgatcagtctaaaaatggctacgccggatacattgacggcggagcaagccaggaggaattttacaaatttattaagcccatcttggaaaaaatggacggcaccgaggagctgctggtaaagctgaacagagaagatctgttgcgcaaacagcgcactttcgacaatggaagcatcccccaccagattcacctgggcgaactgcacgctatcctcaggcggcaagaggatttctacccctttttgaaagataacagggaaaagattgagaaaatcctcacatttcggataccctactatgtaggccccctcgctcggggaaattccagattcgcgtggatgactcgcaaatcagaagagaccatcactccctggaacttcgaggaagtcgtggataagggggcctctgcccagtccttcatcgaaaggatgactaactttgataaaaatctgcctaacgaaaaggtgcttcctaaacactctctgctgtacgagtacttcacagtttataacgagctcaccaaggtcaaatacgtcacagaagggatgagaaagccagcattcctgtctggagagcagaagaaagctatcgtggacctcctcttcaagacgaaccggaaagttaccgtgaaacagctcaaagaagactatttcaaaaagattgaatgtttcgactctgttgaaatcagcggagtggaggatcgcttcaacgcatccctgggaacgtatcacgatctcctgaaaatcattaaagacaaggacttcctggacaatgaggagaacgaggacattcttgaggacattgtcctcacccttacgttgtttgaagatagggagatgattgaagaacgcttgaaaacttacgctcatctcttcgacgacaaagtcatgaaacagctcaagagacgccgatatacaggatgggggcggctgtcaagaaaactgatcaatggcatccgagacaagcagagtggaaagacaatcctggattttcttaagtccgatggatttgccaaccggaacttcatgcagttgatccatgatgactctctcacctttaaggaggacatccagaaagcacaagtttctggccagggggacagtcttcacgagcacatcgctaatcttgcaggtagcccagctatcaaaaagggaatactgcagaccgttaaggtcgtggatgaactcgtcaaagtaatgggaaggcataagcccgagaatatcgttatcgagatggcccgagagaaccaaactacccagaagggacagaagaacagtagggaaaggatgaagaggattgaagagggtataaaagaactggggtcccaaatccttaaggaacacccagttgaaaacacccagcttcagaatgagaagctctacctgtactacctgcagaacggcagggacatgtacgtggatcaggaactggacatcaaccggttgtccgactacgacgtggatgctatcgtgccccaaagctttctcaaagatgattctattgataataaagtgttgacaagatccgataaaaatagagggaagagtgataacgtcccctcagaagaagttgtcaagaaaatgaaaaattattggcggcagctgctgaacgccaaactgatcacacaacggaagttcgataatctgactaaggctgaacgaggtggcctgtctgagttggataaagccggcttcatcaaaaggcagcttgttgagacacgccagatcaccaagcacgtggcccaaattctcgattcacgcatgaacaccaagtacgatgaaaatgacaaactgattcgagaggtgaaagttattactctgaagtctaagctggtctcagatttcagaaaggactttcagttttataaggtgagagagatcaacaattaccaccatgcgcatgatgcctacctgaatgcagtggtaggcactgcacttatcaaaaaatatcccaagctggaatctgaatttgtttacggagactataaagtgtacgatgttaggaaaatgatcgcaaagtctgagcaggaaataggcaaggccaccgctaagtacttcttttacagcaatattatgaattttttcaagaccgagattacactggccaatggagagattcggaagcgaccacttatcgaaacaaacggagaaacaggagaaatcgtgtgggacaagggtagggatttcgcgacagtccgcaaggtcctgtccatgccgcaggtgaacatcgttaaaaagaccgaagtacagaccggaggcttctccaaggaaagtatcctcccgaaaaggaacagcgacaagctgatcgcacgcaaaaaagattgggaccccaagaaatacggcggattcgattctcctacagtcgcttacagtgtactggttgtggccaaagtggagaaagggaagtctaaaaaactcaaaagcgtcaaggaactgctgggcatcacaatcatggagcgatccagcttcgagaaaaaccccatcgactttctcgaagcgaaaggatataaagaggtcaaaaaagacctcatcattaagctgcccaagtactctctctttgagcttgaaaacggccggaaacgaatgctcgctagtgcgggcgagctgcagaaaggtaacgagctggcactgccctctaaatacgttaatttcttgtatctggccagccactatgaaaagctcaaagggtctcccgaagataatgagcagaagcagctgttcgtggaacaacacaaacactaccttgatgagatcatcgagcaaataagcgagttctccaaaagagtgatcctcgccgacgctaacctcgataaggtgctttctgcttacaataagcacagggataagcccatcagggagcaggcagaaaacattatccacttgtttactctgaccaacttgggcgcgcctgcagccttcaagtacttcgacaccaccatagacagaaagcggtacacctctacaaaggaggtcctggacgccacactgattcatcagtcaattacggggctctatgaaacaagaatcgacctctctcagctcggtggagacggcaccggcgggcccaagaagaagaggaaggtatacccatacgatgttcctgactatgcgggctatccctatgacgtcccggactatgcaggatcgtatccttatgacgttccagattacgctggatccatggacgcgaaatcacttacggcatggtcgagaacactggttacgttcaaggacgtgtttgtggactttacacgtgaggagtggaaattgctggatactgcgcaacaaattgtgtatcgaaatgtcatgcttgagaattacaagaacctcgtcagtctcggataccagttgacgaaaccggatgtgatccttaggctcgaaaagggggaagaaccttggctggtataattcgaatccggataagcggccgcctcgagatatctagacccagctttc

SEQ ID NO: 1096 - DNA, 9151 bp, synthetic construct
  source 1..9151: mol_type = other DNA
  misc_feature 1..9151: note = gRNA expression vector
cgaacgacctacaccgaactgagatacctacagcgtgagctatgagaaagcgccacgcttcccgaagggagaaaggcggacaggtatccggtaagcggcagggtcggaacaggagagcgcacgagggagcttccagggggaaacgcctggtatctttatagtcctgtcgggtttcgccacctctgacttgagcgtcgatttttgtgatgctcgtcaggggggcggagcctatggaaaaacgccagcaacgcggcctttttacggttcctggccttttgctggccttttgctcacatgttctttcctgcgttatcccctgattctgtggataaccgtattaccgcctttgagtgagctgataccgctcgccgcagccgaacgaccgagcgcagcgagtcagtgagcgaggaagcggaagagcgcccaatacgcaaaccgcctctccccgcgcgttggccgattcattaatgcagctggcacgacaggtttcccgactggaaagcgggcagtgagcgcaacgcaattaatgtgagttagctcactcattaggcaccccaggctttacactttatgcttccggctcgtatgttgtgtggaattgtgagcggataacaatttcacacaggaaacagctatgaccatgattacgccaagcgcgcaattaaccctcactaaagggaacaaaagctggagctgcaagcttaatgtagtcttatgcaatactcttgtagtcttgcaacatggtaacgatgagttagcaacatgccttacaaggagagaaaaagcaccgtgcatgccgattggtggaagtaaggtggtacgatcgtgccttattaggaaggcaacagacgggtctgacatggattggacgaaccactgaattgccgcattgcagagatattgtatttaagtgcctagctcgatacataaacgggtctctctggttagaccagatctgagcctgggagctctctggctaactagggaacccactgcttaagcctcaataaagcttgccttgagtgcttcaagtagtgtgtgcccgtctgttgtgtgactctggtaactagagatccctcagacccttttagtcagtgtggaaaatctctagcagtggcgcccgaacagggacttgaaagcgaaagggaaaccagaggagctctctcgacgcaggactcggcttgctgaagcgcgcacggcaagaggcgaggggcggcgactggtgagtacgccaaaaattttgactagcggaggctagaaggagagagatgggtgcgagagcgtcagtattaagcgggggagaattagatcgcgatgggaaaaaattcggttaaggccagggggaaagaaaaaatataaattaaaacatatagtatgggcaagcagggagctagaacgattcgcagttaatcctggcctgttagaaacatcagaaggctgtagacaaatactgggacagctacaaccatcccttcagacaggatcagaagaacttagatcattatataatacagtagcaaccctctattgtgtgcatcaaaggatagagataaaagacaccaaggaagctttagacaagatagaggaagagcaaaacaaaagtaagaccaccgcacagcaagcggccgctgatcttcagacctggaggaggagatatgagggacaattggagaagtgaattatataaatataaagtagtaaaaattgaaccattaggagtagcacccaccaaggcaaagagaagagtggtgcagagagaaaaaagagcagtgggaataggagctttgttccttgggttcttgggagcagcaggaagcactatgggcgcagcgtcaatgacgctgacggtacaggccagacaattattgtctggtatagtgcagcagcagaacaatttgctgagggctattgaggcgcaacagcatctgttgcaactcacagtctggggcatcaagcagctccaggcaagaatcctggctgtggaaagatacctaaaggatcaacagctcctggggatttggggttgctctggaaaactcatttgcaccactgctgtgccttggaatgctagttggagtaataaatctctggaacagatttggaatcacacgacctggatggagtgggacagagaaattaacaattacacaagcttaatacactccttaattgaagaatcgcaaaaccagcaagaaaagaatgaacaagaattattggaattagataaatgggcaagtttgtggaattggtttaacataacaaattggctgtggtatataaaattattcataatgatagtaggaggcttggtaggtttaagaatagtttttgctgtactttctatagtgaatagagttaggcagggatattcaccattatcgtttcagacccacctcccaaccccgaggggacccagagagggcctatttcccatgattccttcatatttgcatatacgatacaaggctgttagagagataattagaattaatttgactgtaaacacaaagatattagtacaaaatacgtgacgtagaaagtaataatttcttgggtagtttgcagttttaaaattatgttttaaaatggactatcatatgcttaccgtaacttgaaagtatttcgatttcttggctttatatatcttgtggaaaggacgaaacaccggagacggttgtaaatgagcacacaaaatacacatgctaaaatattatattctatgacctttataaaatcaaccaaaatcttctttttaataactttagtatcaataattagaatttttatgttcctttttgcaaacttttaataaaaatgagcaaaataaaaaaacgctagttttagtaactcgcgttgttttcttcacctttaataatagctactccaccacttgttcctaagcggtcagctcctgcttcaatcattttttgagcatcttcaaatgttctaactccaccagctgctttaactaaagcattgtctttaacaactgacttcattagtttaacatcttcaaatgttgcacctgattttgaaaatcctgttgatgttttaacaaattctaatccagcttcaacagctatttcacaagctttcatgatttcttcttttgttaataaacaattttccataatacatttaacaacatgtgatccagctgctttttttacagctttcatgtcttctaaaactaattcataatttttgtcttttaatgcaccaatatttaataccatatcaatttctgttgcaccatctttaattgcttcagaaacttcgaatgcttttgtagctgttgtgcatgcacctagaggaaaacctacaacatttgttattcctacatttgtgccttttaataattctttacaatagcttgttcaatatgaattaacacaaactgttgcaaaatcaaattcaattgcttcatcacataattgtttaatttcagctttcgtagcatcttgttttaataatgtgtgatctatatatttgtttagtttcattttttctcctatatattcatttttaattttaattctttaataatttcgtctactttaactttagcgttttgaacagattcaccaacacctataaaataaatttttagtttaggttcagttccacttgggcgaacagcaaatcatgacttatcttctaaataaaattttagtaagtcttgtcctggcatattatacattccatcgatgtagtcttcaacattaacaactttaagtccagcaatttgagttaagggtgttgctctcaatgatttcattaatggttcaatttttaatttcttttcttctggtttaaaattcaagtttaaagtgaaagtgtaatatgcacccatttctttaaataaatcttctaaatagtctactaatgttttattttgttttttataaaatcaagcagcctctgctattaatatagaagcttgtattccatctttatctctagctgagtcatcaattacatatccataactttcttcataagcaaaaacaaaatttaatccgttatcttcttctttagcaatttctctacccattcatttaaatccagttaaagtttttacaatattaactccatatttttcatgagcgattctatcacccaaatcacttgttacaaaacttgaatatagagccggattttttggaatgctatttaagcgttttagatttgataattttcaatcaattaaaattggtcctgtttgatttccatctaatcttacaaaatgaccatcatgttttattgccattccaaatctgtcagcatctgggtcattcataataataatatctgcatcatgtttaataccatattcaagcggtatttttcatgcaggatcaaattctggatttggatttacaacatttttaaatgtttcatcttcaaatgcatgctcttcaacctcaataacgttatatcctgattcacgtaatatttttggggtaaatttagttcctgttccattaactgcgctaaaaataatttttaaatcttttttagcttcttgctcttttttgtacgtctctgttttagagctagaaatagcaagttaaaataaggctagtccgttatcaacttgaaaaagtggcaccgagtcggtgcttttttgaattctagatcttgagacaaatggcagtattcatccacaattttaaaagaaaaggggggattggggggtacagtgcaggggaaagaatagtagacataatagcaacagacatacaaactaaagaattacaaaaacaaattacaaaaattcaaaattttcgggtttattacagggacagcagagatccactttggcgccggctcgagtggctccggtgcccgtcagtgggcagagcgcacatcgcccacagtccccgagaagttggggggaggggtcggcaattgaaccggtgcctagagaaggtggcgcggggtaaactgggaaagtgatgtcgtgtactggctccgcctttttcccgagggtgggggagaaccgtatataagtgcagtagtcgccgtgaacgttctttttcgcaacgggtttgccgccagaacacaggtgtcgtgacgcgggatccgccaccatgaccgagtacaagcccacggtgcgcctcgccacccgcgacgacgtccccagggccgtacgcaccctcgccgccgcgttcgccgactaccccgccacgcgccacaccgtcgatccggaccgccacatcgagcgggtcaccgagctgcaagaactcttcctcacgcgcgtcgggctcgacatcggcaaggtgtgggtcgcggacgacggcgccgcggtggcggtctggaccacgccggagagcgtcgaagcgggggcggtgttcgccgagatcggcccgcgcatggccgagttgagcggttcccggctggccgcgcagcaacagatggaaggcctcctggcgccgcaccggcccaaggagcccgcgtggttcctggccaccgtcggagtctcgcccgaccaccagggcaagggtctgggcagcgccgtcgtgctccccggagtggaggcggccgagcgcgccggggtgcccgccttcctggagacctccgcgccccgcaacctccccttctacgagcggctcggcttcaccgtcaccgccgacgtcgaggtgcccgaaggaccgcgcacctggtgcatgacccgcaagcccggtgcctgaacgcgttaagtcgacaatcaacctctggattacaaaatttgtgaaagattgactggtattcttaactatgttgctccttttacgctatgtggatacgctgctttaatgcctttgtatcatgctattgcttcccgtatggctttcattttctcctccttgtataaatcctggttgctgtctctttatgaggagttgtggcccgttgtcaggcaacgtggcgtggtgtgcactgtgtttgctgacgcaacccccactggttggggcattgccaccacctgtcagctcctttccgggactttcgctttccccctccctattgccacggcggaactcatcgccgcctgccttgcccgctgctggacaggggctcggctgttgggcactgacaattccgtggtgttgtcggggaaatcatcgtcctttccttggctgctcgcctgtgttgccacctggattctgcgcgggacgtccttctgctacgtcccttcggccctcaatccagcggaccttccttcccgcggcctgctgccggctctgcggcctcttccgcgtcttcgccttcgccctcagacgagtcggatctccctttgggccgcctccccgcgtcgactttaagaccaatgacttacaaggcagctgtagatcttagccactttttaaaagaaaaggggggactggaagggctaattcactcccaacgaagacaagatctgctttttgcttgtactgggtctctctggttagaccagatctgagcctgggagctctctggctaactagggaacccactgcttaagcctcaataaagcttgccttgagtgcttcaagtagtgtgtgcccgtctgttgtgtgactctggtaactagagatccctcagacccttttagtcagtgtggaaaatctctagcagtacgtatagtagttcatgtcatcttattattcagtatttataacttgcaaagaaatgaatatcagagagtgagaggaacttgtttattgcagcttataatggttacaaataaagcaatagcatcacaaatttcacaaataaagcatttttttcactgcattctagttgtggtttgtccaaactcatcaatgtatcttatcatgtctggctctagctatcccgcccctaactccgcccatcccgcccctaactccgcccagttccgcccattctccgccccatggctgactaattttttttatttatgcagaggccgaggccgcctcggcctctgagctattccagaagtagtgaggaggcttttttggaggcctagggacgtacccaattcgccctatagtgagtcgtattacgcgcgctcactggccgtcgttttacaacgtcgtgactgggaaaaccctggcgttacccaacttaatcgccttgcagcacatccccctttcgccagctggcgtaatagcgaagaggcccgcaccgatcgcccttcccaacagttgcgcagcctgaatggcgaatgggacgcgccctgtagcggcgcattaagcgcggcgggtgtggtggttacgcgcagcgtgaccgctacacttgccagcgccctagcgcccgctcctttcgctttcttcccttcctttctcgccacgttcgccggctttccccgtcaagctctaaatcgggggctccctttagggttccgatttagtgctttacggcacctcgaccccaaaaaacttgattagggtgatggttcacgtagtgggccatcgccctgatagacggtttttcgccctttgacgttggagtccacgttctttaatagtggactcttgttccaaactggaacaacactcaaccctatctcggtctattcttttgatttataagggattttgccgatttcggcctattggttaaaaaatgagctgatttaacaaaaatttaacgcgaattttaacaaaatattaacgcttacaatttaggtggcacttttcggggaaatgtgcgcggaacccctatttgtttatttttctaaatacattcaaatatgtatccgctcatgagacaataaccctgataaatgcttcaataatattgaaaaaggaagagtatgagtattcaacatttccgtgtcgcccttattcccttttttgcggcattttgccttcctgtttttgctcacccagaaacgctggtgaaagtaaaagatgctgaagatcagttgggtgcacgagtgggttacatcgaactggatctcaacagcggtaagatccttgagagttttcgccccgaagaacgttttccaatgatgagcacttttaaagttctgctatgtggcgcggtattatcccgtattgacgccgggcaagagcaactcggtcgccgcatacactattctcagaatgacttggttgagtactcaccagtcacagaaaagcatcttacggatggcatgacagtaagagaattatgcagtgctgccataaccatgagtgataacactgcggccaacttacttctgacaacgatcggaggaccgaaggagctaaccgcttttttgcacaacatgggggatcatgtaactcgccttgatcgttgggaaccggagctgaatgaagccataccaaacgacgagcgtgacaccacgatgcctgtagcaatggcaacaacgttgcgcaaactattaactggcgaactacttactctagcttcccggcaacaattaatagactggatggaggcggataaagttgcaggaccacttctgcgctcggcccttccggctggctggtttattgctgataaatctggagccggtgagcgtgggtctcgcggtatcattgcagcactggggccagatggtaagccctcccgtatcgtagttatctacacgacggggagtcaggcaactatggatgaacgaaatagacagatcgctgagataggtgcctcactgattaagcattggtaactgtcagaccaagtttactcatatatactttagattgatttaaaacttcatttttaatttaaaaggatctaggtgaagatcctttttgataatctcatgaccaaaatcccttaacgtgagttttcgttccactgagcgtcagaccccgtagaaaagatcaaaggatcttcttgagatcctttttttctgcgcgtaatctgctgcttgcaaacaaaaaaaccaccgctaccagcggtggtttgtttgccggatcaagagctaccaactctttttccgaaggtaactggcttcagcagagcgcagataccaaatactgttcttctagtgtagccgtagttaggccaccacttcaagaactctgtagcaccgcctacatacctcgctctgctaatcctgttaccagtggctgctgccagtggcgataagtcgtgtcttaccgggttggactcaagacgatagttaccggataaggcgcagcggtcgggctgaacggggggttcgtgcacacagcccagcttggag

SEQ ID NO: 1097 - DNA, 10569 bp, synthetic construct
  source 1..10569: mol_type = other DNA
ggtaagccctcccgtatcgtagttatctacacgacggggagtcaggcaactatggatgaacgaaatagacagatcgctgagataggtgcctcactgattaagcattggtaactgtcagaccaagtttactcatatatactttagattgatttaaaacttcatttttaatttaaaaggatctaggtgaagatcctttttgataatctcatgaccaaaatcccttaacgtgagttttcgttccactgagtgtcagaccccgtagaaaagatcaaaggatcttcttgagatcctttttttctgcgcgtaatctgctgcttgcaaacaaaaaaaccaccgctaccagcggtggtttgtttgccggatcaagagctaccaactctttttccgaaggtaactggcttcagcagagcgcagataccaaatactgttcttctagtgtagccgtagttaggccaccacttcaagaactctgtagcaccgcctacatacctcgctctgctaatcctgttaccagtggctgctgccagtggcgataagtcgtgtcttaccgggttggactcaagacgatagttaccggataaggcgcagcggtcgggctgaacggggggttcgtgcacacagcccagcttggagcgaacgacctacaccgaactgagatacctacagcgtgagctatgagaaagcgccacgcttcccgaagggagaaaggcggacaggtatccggtaagcggcagggtcggaacaggagagcgcacgagggagcttccagggggaaacgcctggtatctttatagtcctgtcgggtttcgccacctctgacttgagcgtcgatttttgtgatgctcgtcaggggggcggagcctatggaaaaacgccagcaacgcggcctttttacggttcctggccttttgctggccttttgctcacatgttctttcctgcgttatcccctgattctgtggataaccgtattaccgcctttgagtgagctgataccgctcgccgcagccgaacgaccgagcgcagcgagtcagtgagcgaggaagcggaagagcgcccaatacgcaaaccgcctctccccgcgcgttggccgattcattaatgcagctggcacgacaggtttcccgactggaaagcgggcagtgagcgcaacgcaattaatgtgagttagctcactcattaggcaccctaggctttacactttatgcttccggctcgtatgttgtgtggaattgtgagcggataacaatttcacacaggaaacagctatgaccatgattacgccaagctctagctagaggtcgacggtatcgagccccagctggttctttccgcctcagaagccatagagcccaccgcatccccagcatgcctgctattgtcttcccaatcctcccccttgctgtcctgccccaccccaccccccagaatagaatgacacctactcagacaatgcgatgcaattttctcattttattaggaaaggacagtgggagtggcaccttccagggtcaaggaaggcacgggggaggggcaaacaacagatggctggcaactagaaggcacagtcgaggctgatcagcgggtttaaactcaatggtgatggtgatgatgaccggttagactttcctcttcttcttgggagaaccaccagacttgtacagctcgtccatgccgagagtgatcccggcggcggtcacgaactccagcaggaccatgtgatcgcgcttctcgttggggtctttgctcagggcggactgggtgctcaggtagtggttgtcgggcagcagcacggggccgtcgccgatgggggtgttctgctggtagtggtcggcgagctgcacgctgccgtcctcgatgttgtggcggatcttgaagttcaccttgatgccgttcttctgcttgtcggccatgatatagacgttgtggctgttgtagttgtactccagcttgtgccccaggatgttgccgtcctccttgaagtcgatgcccttcagctcgatgcggttcaccagggtgtcgccctcgaacttcacctcggcgcgggtcttgtagttgccgtcgtccttgaagaagatggtgcgctcctggacgtagccttcgggcatggcggacttgaagaagtcgtgctgcttcatgtggtcggggtagcggctgaagcactgcactccataggtcagggtggtcacgagggtgggccagggcacgggcagcttgccggtggtgcagatgaacttcagggtcagcttgccgtaggtggcatcgccctcgccctcgccggacacgctgaacttgtggccgtttacgtcgccgtccagctcgaccaggatgggcaccaccccggtgaacagctcctcgcccttgctcaccataggtccagggttctcctccacgtctccagcctgcttcagcaggctgaagttagtagctccgcttccgactttcctcttcttcttgggctcgaattcgctgccgtcggcggttctttttgagccgccagagggtgatgaattttctatgaggagggtagaggtgtctggagtctctgtgatggctgcctttcgggccgcttggtcagccatccggttgcctctagcctcggcgctgtgtcccttttgatgtcctggacaatggattatgctaagtcttttgggcagaaagagggcttttagtagggccaagatctcgtctttatttttgatctctttgccttctgatgtgagccacccacgccttctgtatatttctccatggatatgggcagtagcaaaagcataacggctatcagtataaacatttagcttcttaccttctgccatctttagggcctgggtgagtgctatcagttcagcccgctgagcggatgtcccggctggcagggctttagcccagattacctcggtctcggtggtcaccgcagctcccgccttacgctgtccctcttgtaagagactgcttccatccgtgtaccaggtgtggtcggcgtctgggagcggctggtccgttaggtcgggtcgggttccgtgggcttcggccaggatatcaaggcagttgtgttgcagcccttcctcaggcagtgggagcagcgtagccgggttcagggctaccaccggtccgaactggacccggtccgtgtccaaaagcaaggcctgatagtgagtcatccgggcgttggaaagccagcggtcggggggttgtttgactagtgcctctactgcatggggggccagaatgactagtggctgtcccatggttagcttgcctgcatcctttgtcagtacggcaatggctgctaccatccgtaggcaagggggccacccagctgctactgggtctagctttttggacaggtaggccaccggccgacgccaaggtcccagtttttgcgttaggacacctttggcgtagccctgcttctcgtcgacaaagagttcaaagggcttagtcaaatctggcaaccccagggctggggcagttagaagagcttgcttgatttcttgataggccttttgttggtctgggccccaattaaacagagtccccggtttggtgagagggtacaggggggctgccatttctgcaaacccagggatgaagaggcgacagaagcctgccttccctaggaactcccttagttgtcgaggggtcttcggagtaggctgccccatcacagtctcttttctggcctcagtcagccatctctgaccctcttttagaagataccccagatacttgacctgtttctggcaaatttgggctttcttggccgaggcccgatacccgaggttccctagggtttgtaacagggcccgagtaccttgttggcagtctagctcagaagtggcggccagcagtaagtcatccacgtactgtagcaggatcaagtctgggtgctggatccggaagtctgctaggtctctgtgcagtgcctcattaaacagggtgggactgtttttgaaaccctgtgggagtctggtccaggtcaattgtcctgagattcccatctctggatctctccactcaaaggcgaagagaggctgactggtggggtggagtctcaggcagaaaaaggcatcctttaaatcaagcacagtgtaccactggtgggacggtgggagcccgctcaagaggttgtaagggttgggcacggtggggtggatgtcttccacccgcttgttgacttctctcagatcctggacaggcctataatcattagtccctggtttcttaacgggtagcaggggcgtgttccagggggactggcagggtaccagtattccctggtccaacagtctctgtatgtggggcttgatccccagtctggcttcttgtgacatggggtattgttttatggacacgggggtagaggttgctttcagaggtatgatcagaggagcttggcgaactgccagtcccatgcccccggtttccgcccaggcctgaggaaaatcagacagccatgtggaccctagagaaacatctggctcttttgaggtctcatgtagccgatactcatcttctatatttagggtgctgctgccgccgctgctgccgccactgctctctggtgttgctgactcgcttgttcctggtgtctcgctgccagaggatcctccgctagatcctccagagtcacctcccagctgagacaggtcgatccgtgtctcgtacaggccggtgatgctctggtggatcagggtggcgtccagcacctctttggtgctggtgtacctcttccggtcgatggtggtgtcaaagtacttgaaggcggcaggggctcccagattggtcagggtaaacaggtggatgatattctcggcctgctctctgatgggcttatcccggtgcttgttgtaggcggacagcactttgtccagattagcgtcggccaggatcactctcttggagaactcgctgatctgctcgatgatctcgtccaggtagtgcttgtgctgttccacaaacagctgtttctgctcattatcctcgggggagcccttcagcttctcatagtggctggccaggtacaggaagttcacatatttggagggcagggccagttcgtttcccttctgcagttcgccggcagaggccagcattctcttccggccgttttccagctcgaacagggagtacttaggcagcttgatgatcaggtcctttttcacttctttgtagcccttggcttccagaaagtcgatgggattcttctcgaagctgcttctttccatgatggtgatccccagcagctctttcacactcttcagtttcttggacttgcccttttccactttggccaccaccagcacagaataggccacggtggggctgtcgaagccgccgtacttcttagggtcccagtccttctttctggcgatcagcttatcgctgttcctcttgggcaggatagactctttgctgaagccgcctgtctgcacctcggtctttttcacgatattcacttggggcatgctcagcactttccgcacggtggcaaaatcccggcccttatcccacacgatctccccggtttcgccgtttgtctcgatcagaggccgcttccggatctcgccgttggccagggtaatctcggtcttgaaaaagttcatgatgttgctgtagaagaagtacttggcggtagccttgccgatttcctgctcgctcttggcgatcatcttccgcacgtcgtacaccttgtagtcgccgtacacgaactcgctttccagcttagggtactttttgatcagggcggttcccacgacggcgttcaggtaggcgtcgtgggcgtggtggtagttgttgatctcgcgcactttgtaaaactggaaatccttccggaaatcggacaccagcttggacttcagggtgatcactttcacttcccggatcagcttgtcattctcgtcgtacttagtgttcatccgggagtccaggatctgtgccacgtgctttgtgatctgccgggtttccaccagctgtctcttgatgaagccggccttatccagttcgctcaggccgcctctctcggccttggtcagattgtcgaactttctctgggtaatcagcttggcgttcagcagctgccgccagtagttcttcatcttcttcacgacctcttcggagggcacgttgtcgctcttgccccggttcttgtcgcttctggtcagcaccttgttgtcgatggagtcgtccttcagaaagctctgaggcacgatagcgtccacatcgtagtcggacagccggttgatgtccagttcctggtccacgtacatatcccgcccattctgcaggtagtacaggtacagcttctcgttctgcagctgggtgttttccacggggtgttctttcaggatctggctgcccagctctttgatgccctcttcgatccgcttcattctctcgcggctgttcttctgtcccttctgggtggtctggttctctctggccatttcgatcacgatgttctcgggcttgtgccggcccatcactttcacgagctcgtccaccaccttcactgtctgcaggatgcccttcttaatggcggggctgccggccagattggcaatgtgctcgtgcaggctatcgccctggccggacacctgggctttctggatgtcctctttaaaggtcaggctgtcgtcgtggatcagctgcatgaagtttctgttggcgaagccgtcggacttcaggaaatccaggattgtcttgccggactgcttgtcccggatgccgttgatcagcttccggctcagcctgccccagccggtgtatctccgccgcttcagctgcttcatcactttgtcgtcgaacaggtgggcataggttttcagccgttcctcgatcatctctctgtcctcaaacagtgtcagggtcagcacgatatcttccagaatgtcctcgttttcctcattgtccaggaagtccttgtccttgataattttcagcagatcgtggtatgtgcccagggaggcgttgaaccgatcttccacgccggagatttccacggagtcgaagcactcgattttcttgaagtagtcctctttcagctgcttcacggtcactttccggttggtcttgaacagcaggtccacgatggcctttttctgctcgccgctcaggaaggcgggctttctcattccctcggtcacgtatttcactttggtcagctcgttatacacggtgaagtactcgtacagcaggctgtgcttgggcagcaccttctcgttgggcaggttcttatcgaagttggtcatccgctcgatgaagctctgggcggaagcgcccttgtccaccacttcctcgaagttccagggggtgatggtttcctcgctctttctggtcatccaggcgaatctgctgtttcccctggccagagggcccacgtagtaggggatgcggaaggtcaggatcttctcgatcttttcccggttgtccttcaggaatgggtaaaaatcttcctgccgccgcagaatggcgtgcagctctcccaggtggatctggtgggggatgctgccgttgtcgaaggtccgctgcttccgcagcaggtcctctctgttcagcttcacgagcagttcctcggtgccgtccatcttttccaggatgggcttgatgaacttgtagaactcttcctggctggctccgccgtcaatgtagccggcgtagccgttcttgctctggtcgaagaaaatctctttgtacttctcaggcagctgctgccgcacgagagctttcagcagggtcaggtcctggtggtgctcgtcgtatctcttgatcatagaggcgctcaggggggccttggtgatctcggtgttcactctcaggatgtcgctcagcaggatggcgtcggacaggttcttggcggccagaaacaggtcggcgtactggtcgccgatctgggccagcaggttgtccaggtcgtcgtcgtaggtgtccttgctcagctgcagtttggcatcctcggccaggtcgaagttgctcttgaagttgggggtcaggcccaggctcagggcaatcaggtttccgaacaggccattcttcttctcgccgggcagctgggcgatcagattttccagccgtctgctcttgctcagtctggcagacaggatggccttggcgtccacgccgctggcgttgatggggttttcctcgaacagctggttgtaggtctgcaccagctggatgaacagcttgtccacgtcgctgttgtcggggttcaggtcgccctcgatcaggaagtggccccggaacttgatcatgtgggccagggccagatagatcagccgcaggtcggccttgtcggtgctgtccaccagtttctttctcaggtggtagatggtggggtacttctcgtggtaggccacctcgtccacgatgttgccgaagatggggtgccgctcgtgcttcttatcctcttccaccaggaaggactcttccagtctgtggaagaagctgtcgtccaccttggccatctcgttgctgaagatctcttgcagatagcagatccggttcttccgtctggtgtatcttcttctggcggttctcttcagccgggtggcctcggctgtttcgccgctgtcgaacagcagggctccgatcaggttcttcttgatgctgtgccggtcggtgttgcccagcaccttgaatttcttgctgggcaccttgtactcgtcggtgatcacggcccagcccacagagttggtgccgatgtccaggccgatgctgtacttcttgtcgactttccgcttcttctttggtgactcgaactcgcttccgtcggctgtccgtttcatggtggcggctctccctatagtgagtcgtattagcggccgcggatctctagcggatctgacggttcactaaaccagctctgcttatatagacctcccaccgtacacgcctaccgcccatttgcgtcaatggggcggagttgttacgacattttggaaagtcccgttgattttggtgccaaaacaaactcccattgacgtcaatggggtggagacttggaaatccccgtgagtcaaaccgctatccacgcccattgatgtactgccaaaaccgcatcaccatggtaatagcgatgactaatacgtagatgtactgccaagtaggaaagtcccataaggtcatgtactgggcataatgccaggcgggccatttaccgtcattgacgtcaatagggggcgtacttggcatatgatacacttgatgtactgccaagtgggcagtttaccgtaaatactccacccattgacgtcaatggaaagtccctattggcgttactatgggaacatacgtcattattgacgtcaatgggcgggggtcgttgggcggtcagccaggcgggccatttaccgtaagttatgtaacgcggaactccatatatgggctatgaactaatgaccccgtaattgattactattaataactagtcaataatcaatgtcaacgcgtatatctggcccgtacatcgcgaagcagcgcaaaacgcctaaccctaagcagattcttcatgcaattgtcggtcaagccttgccttgttgtagcttaaattttgctcgcgcactactcagcgacctccaacacacaagcagggagcagatactggcttaactatgcggcatcagagcagattgtactgagagtagaccctaggggatcgggagatcgatctcccgatccgtcgacgtcaggtggcacttttcggggaaatgtgcgcggaacccctatttgtttatttttctaaatacattcaaatatgtatccgctcatgagacaataaccctgataaatgcttcaataatattgaaaaaggaagagtatgagtattcaacatttccgtgtcgcccttattcccttttttgcggcattttgccttcctgtttttgctcacccagaaacgctggtgaaagtaaaagatgctgaagatcagttgggtgcacgagtgggttacatcgaactggatctcaacagcggtaagatccttgagagttttcgccccgaagaacgttttccaatgatgagcacttttaaagttctgctatgtggcgcggtattatcccgtattgacgccgggcaagagcaactcggtcgccgcatacactattctcagaatgacttggttgagtactcaccagtcacagaaaagcatcttacggatggcatgacagtaagagaattatgcagtgctgccataaccatgagtgataacactgcggccaacttacttctgacaacgatcggaggaccgaaggagctaaccgcttttttgcacaacatgggggatcatgtaactcgccttgatcgttgggaaccggagctgaatgaagccataccaaacgacgagcgtgacaccacgatgcctgtagcaatggcaacaacgttgcgcaaactattaactggcgaactacttactctagcttcccggcaacaattaatagactggatggaggcggataaagttgcaggaccacttctgcgctcggcccttccggctggctggtttattgctgataaatctggagccggtgagcgtgggtctcgcggtatcattgcagcactggggccagat

SEQ ID NO: 1098 - DNA, 3004 bp, synthetic construct
  source 1..3004: mol_type = other DNA
gagggcctatttcccatgattccttcatatttgcatatacgatacaaggctgttagagagataattagaattaatttgactgtaaacacaaagatattagtacaaaatacgtgacgtagaaagtaataatttcttgggtagtttgcagttttaaaattatgttttaaaatggactatcatatgcttaccgtaacttgaaagtatttcgatttcttggctttatatatcttgtggaaaggacgaaacacccgagaccgtagtcaaaagcctccggtcggaggcttttgacttggctgaggagtgccattaagcaccggtggagtgacgaccttcagcacgttcgtactgttcaacgatggtgtagtcttcgttgtgggaggtgatgtccagtttgatgtcggttttgtaagcacccggcagctgaaccggttttttagccatgtaggtggttttaacttcagcgtcgtagtgaccaccgtctttcagtttcagacgcattttgatttcacctttcagagcaccgtcttccgggtacatacgttcggtggaagcttcccaacccatggtttttttctgcataaccggaccgtcggacgggaagttggtaccacgcagtttaactttgtagatgaactcaccgtcttgcagggaggagtcctgggtaacggtaacaacaccaccgtcttcgaagttcataacacgttcccatttgaaaccttccgggaaggacagtttcaggtagtccgggatgtcagccgggtgtttaacgtaagctttggaaccgtactggaactgcggggacaggatgtcccaagcgaacggcagcggaccacctttggtaactttcagtttagcggtctgggtaccttcgtacggacgaccttcaccttcaccttcgatttcgaactcgtgaccgttaacggaaccttccatacgaactttgaaacgcatgaactctttgataacgtcttcgctactcgccatagatcctttctcctctttcagatccgtgctcagtatctctatcactgatagggatgtcaatctctatcactgatagggaggtctcgtttttttaagcttgggccgctcgaggtacctctctacatatgacatgtgagcaaaaggccagcaaaaggccaggaaccgtaaaaaggccgcgttgctggcgtttttccataggctccgcccccctgacgagcatcacaaaaatcgacgctcaagtcagaggtggcgaaacccgacaggactataaagataccaggcgtttccccctggaagctccctcgtgcgctctcctgttccgaccctgccgcttaccggatacctgtccgcctttctcccttcgggaagcgtggcgctttctcatagctcacgctgtaggtatctcagttcggtgtaggtcgttcgctccaagctgggctgtgtgcacgaaccccccgttcagcccgaccgctgcgccttatccggtaactatcgtcttgagtccaacccggtaagacacgacttatcgccactggcagcagccactggtaacaggattagcagagcgaggtatgtaggcggtgctacagagttcttgaagtggtggcctaactacggctacactagaagaacagtatttggtatctgcgctctgctgaagccagttaccttcggaaaaagagttggtagctcttgatccggcaaacaaaccaccgctggtagcggtggtttttttgtttgcaagcagcagattacgcgcagaaaaaaaggatctcaagaagatcctttgatcttttctacggggtctgacgctcagtggaacgaaaactcacgttaagggattttggtcatgagattatcaaaaaggatcttcacctagatccttttaaattaaaaatgaagttttaaatcaatctaaagtatatatgagtaaacttggtctgacagttaccaatgcttaatcagtgaggcacctatctcagcgatctgtctatttcgttcatccatagttgcctgactccccgtcgtgtagataactacgatacgggagggcttaccatctggccccagtgctgcaatgataccgcgagatccacgctcaccggctccagatttatcagcaataaaccagccagccggaagggccgagcgcagaagtggtcctgcaactttatccgcctccatccagtctattaattgttgccgggaagctagagtaagtagttcgccagttaatagtttgcgcaacgttgttgccattgctacaggcatcgtggtgtcacgctcgtcgtttggtatggcttcattcagctccggttcccaacgatcaaggcgagttacatgatcccccatgttgtgcaaaaaagcggttagctccttcggtcctccgatcgttgtcagaagtaagttggccgcagtgttatcactcatggttatggcagcactgcataattctcttactgtcatgccatccgtaagatgcttttctgtgactggtgagtactcaaccaagtcattctgagaatagtgtatgcggcgaccgagttgctcttgcccggcgtcaatacgggataataccgcgccacatagcagaactttaaaagtgctcatcattggaaaacgttcttcggggcgaaaactctcaaggatcttaccgctgttgagatccagttcgatgtaacccactcgtgcacccaactgatcttcagcatcttttactttcaccagcgtttctgggtgagcaaaaacaggaaggcaaaatgccgcaaaaaagggaataagggcgacacggaaatgttgaatactcatactcttcctttttcaatattattgaagcatttatcagggttattgtctcatgagcggatacatatttgaatgtatttagaaaaataaacaaataggggttccgcgcacatttccccgaaaagtgccacctgacgtcgctagctgtacaaaaaagcaggctttaaaggaaccaattcagtcgactggatccggtaccaaggtcgggcaggaa

SEQ ID NO: 1099 - DNA, 9753 bp, synthetic construct
  source 1..9753: mol_type = other DNA
gacattgattattgactagttattaatagtaatcaattacggggtcattagttcatagcccatatatggagttccgcgttacataacttacggtaaatggcccgcctggctgaccgcccaacgacccccgcccattgacgtcaataatgacgtatgttcccatagtaacgccaatagggactttccattgacgtcaatgggtggagtatttacggtaaactgcccacttggcagtacatcaagtgtatcatatgccaagtacgccccctattgacgtcaatgacggtaaatggcccgcctggcattatgcccagtacatgaccttatgggactttcctacttggcagtacatctacgtattagtcatcgctattaccatggtgatgcggttttggcagtacatcaatgggcgtggatagcggtttgactcacggggatttccaagtctccaccccattgacgtcaatgggagtttgttttggcaccaaaatcaacgggactttccaaaatgtcgtaacaactccgccccattgacgcaaatgggcggtaggcgtgtacggtgggaggtctatataagcagagctggtttagtgaaccgtcagatccgctagagatccgcggccgctaatacgactcactatagggagagccgccaccatgaaacggacagccgacggaagcgagttcgagtcaccaaagaagaagcggaaagtcgacaagaagtacagcatcggcctggacatcggcaccaactctgtgggctgggccgtgatcaccgacgagtacaaggtgcccagcaagaaattcaaggtgctgggcaacaccgaccggcacagcatcaagaagaacctgatcggagccctgctgttcgacagcggcgaaacagccgaggccacccggctgaagagaaccgccagaagaagatacaccagacggaagaaccggatctgctatctgcaagagatcttcagcaacgagatggccaaggtggacgacagcttcttccacagactggaagagtccttcctggtggaagaggataagaagcacgagcggcaccccatcttcggcaacatcgtggacgaggtggcctaccacgagaagtaccccaccatctaccacctgagaaagaaactggtggacagcaccgacaaggccgacctgcggctgatctatctggccctggcccacatgatcaagttccggggccacttcctgatcgagggcgacctgaaccccgacaacagcgacgtggacaagctgttcatccagctggtgcagacctacaaccagctgttcgaggaaaaccccatcaacgccagcggcgtggacgccaaggccatcctgtctgccagactgagcaagagcagacggctggaaaatctgatcgcccagctgcccggcgagaagaagaatggcctgttcggaaacctgattgccctgagcctgggcctgacccccaacttcaagagcaacttcgacctggccgaggatgccaaactgcagctgagcaaggacacctacgacgacgacctggacaacctgctggcccagatcggcgaccagtacgccgacctgtttctggccgccaagaacctgtccgacgccatcctgctgagcgacatcctgagagtgaacaccgagatcaccaaggcccccctgagcgcctctatgatcaagagatacgacgagcaccaccaggacctgaccctgctgaaagctctcgtgcggcagcagctgcctgagaagtacaaagagattttcttcgaccagagcaagaacggctacgccggctacattgacggcggagccagccaggaagagttctacaagttcatcaagcccatcctggaaaagatggacggcaccgaggaactgctcgtgaagctgaacagagaggacctgctgcggaagcagcggaccttcgacaacggcagcatcccccaccagatccacctgggagagctgcacgccattctgcggcggcaggaagatttttacccattcctgaaggacaaccgggaaaagatcgagaagatcctgaccttccgcatcccctactacgtgggccctctggccaggggaaacagcagattcgcctggatgaccagaaagagcgaggaaaccatcaccccctggaacttcgaggaagtggtggacaagggcgcttccgcccagagcttcatcgagcggatgaccaacttcgataagaacctgcccaacgagaaggtgctgcccaagcacagcctgctgtacgagtacttcaccgtgtataacgagctgaccaaagtgaaatacgtgaccgagggaatgagaaagcccgccttcctgagcggcgagcagaaaaaggccatcgtggacctgctgttcaagaccaaccggaaagtgaccgtgaagcagctgaaagaggactacttcaagaaaatcgagtgcttcgactccgtggaaatctccggcgtggaagatcggttcaacgcctccctgggcacataccacgatctgctgaaaattatcaaggacaaggacttcctggacaatgaggaaaacgaggacattctggaagatatcgtgctgaccctgacactgtttgaggacagagagatgatcgaggaacggctgaaaacctatgcccacctgttcgacgacaaagtgatgaagcagctgaagcggcggagatacaccggctggggcaggctgagccggaagctgatcaacggcatccgggacaagcagtccggcaagacaatcctggatttcctgaagtccgacggcttcgccaacagaaacttcatgcagctgatccacgacgacagcctgacctttaaagaggacatccagaaagcccaggtgtccggccagggcgatagcctgcacgagcacattgccaatctggccggcagccccgccattaagaagggcatcctgcagacagtgaaggtggtggacgagctcgtgaaagtgatgggccggcacaagcccgagaacatcgtgatcgaaatggccagagagaaccagaccacccagaagggacagaagaacagccgcgagagaatgaagcggatcgaagagggcatcaaagagctgggcagccagatcctgaaagaacaccccgtggaaaacacccagctgcagaacgagaagctgtacctgtactacctgcagaatgggcgggatatgtacgtggaccaggaactggacatcaaccggctgtccgactacgatgtggacgctatcgtgcctcagagctttctgaaggacgactccatcgacaacaaggtgctgaccagaagcgacaagaaccggggcaagagcgacaacgtgccctccgaagaggtcgtgaagaagatgaagaactactggcggcagctgctgaacgccaagctgattacccagagaaagttcgacaatctgaccaaggccgagagaggcggcctgagcgaactggataaggccggcttcatcaagagacagctggtggaaacccggcagatcacaaagcacgtggcacagatcctggactcccggatgaacactaagtacgacgagaatgacaagctgatccgggaagtgaaagtgatcaccctgaagtccaagctggtgtccgatttccggaaggatttccagttttacaaagtgcgcgagatcaacaactaccaccacgcccacgacgcctacctgaacgccgtcgtgggaaccgccctgatcaaaaagtaccctaagctggaaagcgagttcgtgtacggcgactacaaggtgtacgacgtgcggaagatgatcgccaagagcgagcaggaaatcggcaaggctaccgccaagtacttcttctacagcaacatcatgaactttttcaagaccgagattaccctggccaacggcgagatccggaagcggcctctgatcgagacaaacggcgaaaccggggagatcgtgtgggataagggccgggattttgccaccgtgcggaaagtgctgagcatgccccaagtgaatatcgtgaaaaagaccgaggtgcagacaggcggcttcagcaaagagtctatcctgcccaagaggaacagcgataagctgatcgccagaaagaaggactgggaccctaagaagtacggcggcttcgacagccccaccgtggcctattctgtgctggtggtggccaaagtggaaaagggcaagtccaagaaactgaagagtgtgaaagagctgctggggatcaccatcatggaaagaagcagcttcgagaagaatcccatcgactttctggaagccaagggctacaaagaagtgaaaaaggacctgatcatcaagctgcctaagtactccctgttcgagctggaaaacggccggaagagaatgctggcctctgccggcgaactgcagaagggaaacgaactggccctgccctccaaatatgtgaacttcctgtacctggccagccactatgagaagctgaagggctcccccgaggataatgagcagaaacagctgtttgtggaacagcacaagcactacctggacgagatcatcgagcagatcagcgagttctccaagagagtgatcctggccgacgctaatctggacaaagtgctgtccgcctacaacaagcaccgggataagcccatcagagagcaggccgagaatatcatccacctgtttaccctgaccaatctgggagcccctgccgccttcaagtactttgacaccaccatcgaccggaagaggtacaccagcaccaaagaggtgctggacgccaccctgatccaccagagcatcaccggcctgtacgagacacggatcgacctgtctcagctgggaggtgactctggaggatctagcggaggatcctctggcagcgagacaccaggaacaagcgagtcagcaacaccagagagcagtggcggcagcagcggcggcagcagcaccctaaatatagaagatgagtatcggctacatgagacctcaaaagagccagatgtttctctagggtccacatggctgtctgattttcctcaggcctgggcggaaaccgggggcatgggactggcagttcgccaagctcctctgatcatacctctgaaagcaacctctacccccgtgtccataaaacaataccccatgtcacaagaagccagactggggatcaagccccacatacagagactgttggaccagggaatactggtaccctgccagtccccctggaacacgcccctgctacccgttaagaaaccagggactaatgattataggcctgtccaggatctgagagaagtcaacaagcgggtggaagacatccaccccaccgtgcccaacccttacaacctcttgagcgggctcccaccgtcccaccagtggtacactgtgcttgatttaaaggatgcctttttctgcctgagactccaccccaccagtcagcctctcttcgcctttgagtggagagatccagagatgggaatctcaggacaattgacctggaccagactcccacagggtttcaaaaacagtcccaccctgtttaatgaggcactgcacagagacctagcagacttccggatccagcacccagacttgatcctgctacagtacgtggatgacttactgctggccgccacttctgagctagactgccaacaaggtactcgggccctgttacaaaccctagggaacctcgggtatcgggcctcggccaagaaagcccaaatttgccagaaacaggtcaagtatctggggtatcttctaaaagagggtcagagatggctgactgaggccagaaaagagactgtgatggggcagcctactccgaagacccctcgacaactaagggagttcctagggaaggcaggcttctgtcgcctcttcatccctgggtttgcagaaatggcagcccccctgtaccctctcaccaaaccggggactctgtttaattggggcccagaccaacaaaaggcctatcaagaaatcaagcaagctcttctaactgccccagccctggggttgccagatttgactaagccctttgaactctttgtcgacgagaagcagggctacgccaaaggtgtcctaacgcaaaaactgggaccttggcgtcggccggtggcctacctgtccaaaaagctagacccagtagcagctgggtggcccccttgcctacggatggtagcagccattgccgtactgacaaaggatgcaggcaagctaaccatgggacagccactagtcattctggccccccatgcagtagaggcactagtcaaacaaccccccgaccgctggctttccaacgcccggatgactcactatcaggccttgcttttggacacggaccgggtccagttcggaccggtggtagccctgaacccggctacgctgctcccactgcctgaggaagggctgcaacacaactgccttgatatcctggccgaagcccacggaacccgacccgacctaacggaccagccgctcccagacgccgaccacacctggtacacggatggaagcagtctcttacaagagggacagcgtaaggcgggagctgcggtgaccaccgagaccgaggtaatctgggctaaagccctgccagccgggacatccgctcagcgggctgaactgatagcactcacccaggccctaaagatggcagaaggtaagaagctaaatgtttatactgatagccgttatgcttttgctactgcccatatccatggagaaatatacagaaggcgtgggtggctcacatcagaaggcaaagagatcaaaaataaagacgagatcttggccctactaaaagccctctttctgcccaaaagacttagcataatccattgtccaggacatcaaaagggacacagcgccgaggctagaggcaaccggatggctgaccaagcggcccgaaaggcagccatcacagagactccagacacctctaccctcctcatagaaaattcatcaccctctggcggctcaaaaagaaccgccgacggcagcgaattcgagcccaagaagaagaggaaagtctaaccggtcatcatcaccatcaccattgagtttaaacccgctgatcagcctcgactgtgccttctagttgccagccatctgttgtttgcccctcccccgtgccttccttgaccctggaaggtgccactcccactgtcctttcctaataaaatgagaaaattgcatcgcattgtctgagtaggtgtcattctattctggggggtggggtggggcaggacagcaagggggaggattgggaagacaatagcaggcatgctggggatgcggtgggctctatggcttctgaggcggaaagaaccagctggggctcgataccgtcgacctctagctagagcttggcgtaatcatggtcatagctgtttcctgtgtgaaattgttatccgctcacaattccacacaacatacgagccggaagcataaagtgtaaagcctagggtgcctaatgagtgagctaactcacattaattgcgttgcgctcactgcccgctttccagtcgggaaacctgtcgtgccagctgcattaatgaatcggccaacgcgcggggagaggcggtttgcgtattgggcgctcttccgcttcctcgctcactgactcgctgcgctcggtcgttcggctgcggcgagcggtatcagctcactcaaaggcggtaatacggttatccacagaatcaggggataacgcaggaaagaacatgtgagcaaaaggccagcaaaaggccaggaaccgtaaaaaggccgcgttgctggcgtttttccataggctccgcccccctgacgagcatcacaaaaatcgacgctcaagtcagaggtggcgaaacccgacaggactataaagataccaggcgtttccccctggaagctccctcgtgcgctctcctgttccgaccctgccgcttaccggatacctgtccgcctttctcccttcgggaagcgtggcgctttctcatagctcacgctgtaggtatctcagttcggtgtaggtcgttcgctccaagctgggctgtgtgcacgaaccccccgttcagcccgaccgctgcgccttatccggtaactatcgtcttgagtccaacccggtaagacacgacttatcgccactggcagcagccactggtaacaggattagcagagcgaggtatgtaggcggtgctacagagttcttgaagtggtggcctaactacggctacactagaagaacagtatttggtatctgcgctctgctgaagccagttaccttcggaaaaagagttggtagctcttgatccggcaaacaaaccaccgctggtagcggtggtttttttgtttgcaagcagcagattacgcgcagaaaaaaaggatctcaagaagatcctttgatcttttctacggggtctgacactcagtggaacgaaaactcacgttaagggattttggtcatgagattatcaaaaaggatcttcacctagatccttttaaattaaaaatgaagttttaaatcaatctaaagtatatatgagtaaacttggtctgacagttaccaatgcttaatcagtgaggcacctatctcagcgatctgtctatttcgttcatccatagttgcctgactccccgtcgtgtagataactacgatacgggagggcttaccatctggccccagtgctgcaatgataccgcgagacccacgctcaccggctccagatttatcagcaataaaccagccagccggaagggccgagcgcagaagtggtcctgcaactttatccgcctccatccagtctattaattgttgccgggaagctagagtaagtagttcgccagttaatagtttgcgcaacgttgttgccattgctacaggcatcgtggtgtcacgctcgtcgtttggtatggcttcattcagctccggttcccaacgatcaaggcgagttacatgatcccccatgttgtgcaaaaaagcggttagctccttcggtcctccgatcgttgtcagaagtaagttggccgcagtgttatcactcatggttatggcagcactgcataattctcttactgtcatgccatccgtaagatgcttttctgtgactggtgagtactcaaccaagtcattctgagaatagtgtatgcggcgaccgagttgctcttgcccggcgtcaatacgggataataccgcgccacatagcagaactttaaaagtgctcatcattggaaaacgttcttcggggcgaaaactctcaaggatcttaccgctgttgagatccagttcgatgtaacccactcgtgcacccaactgatcttcagcatcttttactttcaccagcgtttctgggtgagcaaaaacaggaaggcaaaatgccgcaaaaaagggaataagggcgacacggaaatgttgaatactcatactcttcctttttcaatattattgaagcatttatcagggttattgtctcatgagcggatacatatttgaatgtatttagaaaaataaacaaataggggttccgcgcacatttccccgaaaagtgccacctgacgtcgacggatcgggagatcgatctcccgatcccctagggtctactctcagtacaatctgctctgatgccgcatagttaagccagtatctgctccctgcttgtgtgttggaggtcgctgagtagtgcgcgagcaaaatttaagctacaacaaggcaaggcttgaccgacaattgcatgaagaatctgcttagggttaggcgttttgcgctgcttcgcgatgtacgggccagatatacgcgtt

SEQ ID NO: 1100 - DNA, 134 bp, synthetic construct
  source 1..134: mol_type = other DNA
  misc_feature 1..134: note = K897M
ttccgcaggcgcacggacaagttttagagctagaaatagcaagttaaaataaggctagtccgttatcaacttgaaaaagtggcaccgagtcggtgctcccccgcctcacccatgtccgtgcgcctgcggaagga

SEQ ID NO: 1101 - DNA, 125 bp, synthetic construct
  source 1..125: mol_type = other DNA
  misc_feature 1..125: note = R784W
gcaggatctcgatggagcccgttttagagctagaaatagcaagttaaaataaggctagtccgttatcaacttgaaaaagtggcaccgagtcggtgcacttcatctcctggggctccatcgagatc

SEQ ID NO: 1102 - DNA, 121 bp, synthetic construct
  source 1..121: mol_type = other DNA
  misc_feature 1..121: note = R1047H
ctcacctgttgagctggcgcgttttagagctagaaatagcaagttaaaataaggctagtccgttatcaacttgaaaaagtggcaccgagtcggtgcgccctccagcaccagctcaacaggt

SEQ ID NO: 1103 - DNA, 131 bp, synthetic construct
  source 1..131: mol_type = other DNA
  misc_feature 1..131: note = P347S
tggtgggcgaagccaagaaggttttagagctagaaatagcaagttaaaataaggctagtccgttatcaacttgaaaaagtggcaccgagtcggtgctcaagggcgactccttcttggcttcgcccaccagt

SEQ ID NO: 1104 - DNA, 127 bp, synthetic construct
  source 1..127: mol_type = other DNA
  misc_feature 1..127: note = A614V
catcaaggacaagtatgtgagttttagagctagaaatagcaagttaaaataaggctagtccgttatcaacttgaaaaagtggcaccgagtcggtgcgaagtagagcaccgtcacatacttgtccttg

SEQ ID NO: 1105 - DNA, 129 bp, synthetic construct
  source 1..129: mol_type = other DNA
  misc_feature 1..129: note = S631A
atcttctctgagttggtgttgttttagagctagaaatagcaagttaaaataaggctagtccgttatcaacttgaaaaagtggcaccgagtcggtgctcggcaacgtcgctcccaacaccaactcagaga

SEQ ID NO: 1106 - DNA, 126 bp, synthetic construct
  source 1..126: mol_type = other DNA
  misc_feature 1..126: note = N588K
gtttgcctatctggtcgcccgttttagagctagaaatagcaagttaaaataaggctagtccgttatcaacttgaaaaagtggcaccgagtcggtgcggctgcacaaactgggcgaccagataggca

SEQ ID NO: 1107 - DNA, 144 bp, synthetic construct
  source 1..144: mol_type = other DNA
  misc_feature 1..144: note = L552S
ccagtgcgcgatgagcgcaagttttagagctagaaatagcaagttaaaataaggctagtccgttatcaacttgaaaaagtggcaccgagtcggtgcgtgctgttctcgctcatgtgcacctttgcgctcatcgcgcactggcta

SEQ ID NO: 1108 - DNA, 124 bp, synthetic construct
  source 1..124: mol_type = other DNA
  misc_feature 1..124: note = G584S
ccacacatggactcacgcatgttttagagctagaaatagcaagttaaaataaggctagtccgttatcaacttgaaaaagtggcaccgagtcggtgctgcagccagctgatgcgtgagtccatgt

SEQ ID NO: 1109 - DNA, 131 bp, synthetic construct
  source 1..131: mol_type = other DNA
  misc_feature 1..131: note = S818L
ctgaacctgtatgcaaggccgttttagagctagaaatagcaagttaaaataaggctagtccgttatcaacttgaaaaagtggcaccgagtcggtgcatccccgttcaacttgccaggccttgcatacaggt

SEQ ID NO: 1110 - DNA, 124 bp, synthetic construct
  source 1..124: mol_type = other DNA
  misc_feature 1..124: note = R823W
caagtcgaacggggatgtgcgttttagagctagaaatagcaagttaaaataaggctagtccgttatcaacttgaaaaagtggcaccgagtcggtgcgtgagggcccacacatccccgttcgact

SEQ ID NO: 1111 - DNA, 133 bp, synthetic construct
  source 1..133: mol_type = other DNA
  misc_feature 1..133: note = A190T
gtccaccaccacggcccccggttttagagctagaaatagcaagttaaaataaggctagtccgttatcaacttgaaaaagtggcaccgagtcggtgcgcggcgcgggcaccccgggggccgtggtggtggacgt

SEQ ID NO: 1112 - DNA, 125 bp, synthetic construct
  source 1..125: mol_type = other DNA
  misc_feature 1..125: note = G903R
cccacagacacggagcagccgttttagagctagaaatagcaagttaaaataaggctagtccgttatcaacttgaaaaagtggcaccgagtcggtgcgacacctcccttggctgctccgtgtctgt

SEQ ID NO: 1113 - DNA, 121 bp, synthetic construct
  source 1..121: mol_type = other DNA
  misc_feature 1..121: note = V476I
ctcctcgttggcattgacgtgttttagagctagaaatagcaagttaaaataaggctagtccgttatcaacttgaaaaagtggcaccgagtcggtgcgcaccacctacatcaatgccaacga

SEQ ID NO: 1114 - DNA, 4101 bp, synthetic construct
  source 1..4101: mol_type = other DNA
gacaagaagtacagcatcggcctggacatcggcaccaactctgtgggctgggccgtgatcaccgacgagtacaaggtgcccagcaagaaattcaaggtgctgggcaacaccgaccggcacagcatcaagaagaacctgatcggagccctgctgttcgacagcggcgaaacagccgaggccacccggctgaagagaaccgccagaagaagatacaccagacggaagaaccggatctgctatctgcaagagatcttcagcaacgagatggccaaggtggacgacagcttcttccacagactggaagagtccttcctggtggaagaggataagaagcacgagcggcaccccatcttcggcaacatcgtggacgaggtggcctaccacgagaagtaccccaccatctaccacctgagaaagaaactggtggacagcaccgacaaggccgacctgcggctgatctatctggccctggcccacatgatcaagttccggggccacttcctgatcgagggcgacctgaaccccgacaacagcgacgtggacaagctgttcatccagctggtgcagacctacaaccagctgttcgaggaaaaccccatcaacgccagcggcgtggacgccaaggccatcctgtctgccagactgagcaagagcagacggctggaaaatctgatcgcccagctgcccggcgagaagaagaatggcctgttcggaaacctgattgccctgagcctgggcctgacccccaacttcaagagcaacttcgacctggccgaggatgccaaactgcagctgagcaaggacacctacgacgacgacctggacaacctgctggcccagatcggcgaccagtacgccgacctgtttctggccgccaagaacctgtccgacgccatcctgctgagcgacatcctgagagtgaacaccgagatcaccaaggcccccctgagcgcctctatgatcaagagatacgacgagcaccaccaggacctgaccctgctgaaagctctcgtgcggcagcagctgcctgagaagtacaaagagattttcttcgaccagagcaagaacggctacgccggctacattgacggcggagccagccaggaagagttctacaagttcatcaagcccatcctggaaaagatggacggcaccgaggaactgctcgtgaagctgaacagagaggacctgctgcggaagcagcggaccttcgacaacggcagcatcccccaccagatccacctgggagagctgcacgccattctgcggcggcaggaagatttttacccattcctgaaggacaaccgggaaaagatcgagaagatcctgaccttccgcatcccctactacgtgggccctctggccaggggaaacagcagattcgcctggatgaccagaaagagcgaggaaaccatcaccccctggaacttcgaggaagtggtggacaagggcgcttccgcccagagcttcatcgagcggatgaccaacttcgataagaacctgcccaacgagaaggtgctgcccaagcacagcctgctgtacgagtacttcaccgtgtataacgagctgaccaaagtgaaatacgtgaccgagggaatgagaaagcccgccttcctgagcggcgagcagaaaaaggccatcgtggacctgctgttcaagaccaaccggaaagtgaccgtgaagcagctgaaagaggactacttcaagaaaatcgagtgcttcgactccgtggaaatctccggcgtggaagatcggttcaacgcctccctgggcacataccacgatctgctgaaaattatcaaggacaaggacttcctggacaatgaggaaaacgaggacattctggaagatatcgtgctgaccctgacactgtttgaggacagagagatgatcgaggaacggctgaaaacctatgcccacctgttcgacgacaaagtgatgaagcagctgaagcggcggagatacaccggctggggcaggctgagccggaagctgatcaacggcatccgggacaagcagtccggcaagacaatcctggatttcctgaagtccgacggcttcgccaacagaaacttcatgcagctgatccacgacgacagcctgacctttaaagaggacatccagaaagcccaggtgtccggccagggcgatagcctgcacgagcacattgccaatctggccggcagccccgccattaagaagggcatcctgcagacagtgaaggtggtggacgagctcgtgaaagtgatgggccggcacaagcccgagaacatcgtgatcgaaatggccagagagaaccagaccacccagaagggacagaagaacagccgcgagagaatgaagcggatcgaagagggcatcaaagagctgggcagccagatcctgaaagaacaccccgtggaaaacacccagctgcagaacgagaagctgtacctgtactacctgcagaatgggcgggatatgtacgtggaccaggaactggacatcaaccggctgtccgactacgatgtggacgctatcgtgcctcagagctttctgaaggacgactccatcgacaacaaggtgctgaccagaagcgacaagaaccggggcaagagcgacaacgtgccctccgaagaggtcgtgaagaagatgaagaactactggcggcagctgctgaacgccaagctgattacccagagaaagttcgacaatctgaccaaggccgagagaggcggcctgagcgaactggataaggccggcttcatcaagagacagctggtggaaacccggcagatcacaaagcacgtggcacagatcctggactcccggatgaacactaagtacgacgagaatgacaagctgatccgggaagtgaaagtgatcaccctgaagtccaagctggtgtccgatttccggaaggatttccagttttacaaagtgcgcgagatcaacaactaccaccacgcccacgacgcctacctgaacgccgtcgtgggaaccgccctgatcaaaaagtaccctaagctggaaagcgagttcgtgtacggcgactacaaggtgtacgacgtgcggaagatgatcgccaagagcgagcaggaaatcggcaaggctaccgccaagtacttcttctacagcaacatcatgaactttttcaagaccgagattaccctggccaacggcgagatccggaagcggcctctgatcgagacaaacggcgaaaccggggagatcgtgtgggataagggccgggattttgccaccgtgcggaaagtgctgagcatgccccaagtgaatatcgtgaaaaagaccgaggtgcagacaggcggcttcagcaaagagtctatcctgcccaagaggaacagcgataagctgatcgccagaaagaaggactgggaccctaagaagtacggcggcttcgacagccccaccgtggcctattctgtgctggtggtggccaaagtggaaaagggcaagtccaagaaactgaagagtgtgaaagagctgctggggatcaccatcatggaaagaagcagcttcgagaagaatcccatcgactttctggaagccaagggctacaaagaagtgaaaaaggacctgatcatcaagctgcctaagtactccctgttcgagctggaaaacggccggaagagaatgctggcctctgccggcgaactgcagaagggaaacgaactggccctgccctccaaatatgtgaacttcctgtacctggccagccactatgagaagctgaagggctcccccgaggataatgagcagaaacagctgtttgtggaacagcacaagcactacctggacgagatcatcgagcagatcagcgagttctccaagagagtgatcctggccgacgctaatctggacaaagtgctgtccgcctacaacaagcaccgggataagcccatcagagagcaggccgagaatatcatccacctgtttaccctgaccaatctgggagcccctgccgccttcaagtactttgacaccaccatcgaccggaagaggtacaccagcaccaaagaggtgctggacgccaccctgatccaccagagcatcaccggcctgtacgagacacggatcgacctgtctcagctgggaggtgac

SEQ ID NO: 1115 - DNA, 6341 bp, synthetic construct
  source 1..6341: mol_type = other DNA
ccaaagaagaagcggaaagtcgacaagaagtacagcatcggcctggacatcggcaccaactctgtgggctgggccgtgatcaccgacgagtacaaggtgcccagcaagaaattcaaggtgctgggcaacaccgaccggcacagcatcaagaagaacctgatcggagccctgctgttcgacagcggcgaaacagccgaggccacccggctgaagagaaccgccagaagaagatacaccagacggaagaaccggatctgctatctgcaagagatcttcagcaacgagatggccaaggtggacgacagcttcttccacagactggaagagtccttcctggtggaagaggataagaagcacgagcggcaccccatcttcggcaacatcgtggacgaggtggcctaccacgagaagtaccccaccatctaccacctgagaaagaaactggtggacagcaccgacaaggccgacctgcggctgatctatctggccctggcccacatgatcaagttccggggccacttcctgatcgagggcgacctgaaccccgacaacagcgacgtggacaagctgttcatccagctggtgcagacctacaaccagctgttcgaggaaaaccccatcaacgccagcggcgtggacgccaaggccatcctgtctgccagactgagcaagagcagacggctggaaaatctgatcgcccagctgcccggcgagaagaagaatggcctgttcggaaacctgattgccctgagcctgggcctgacccccaacttcaagagcaacttcgacctggccgaggatgccaaactgcagctgagcaaggacacctacgacgacgacctggacaacctgctggcccagatcggcgaccagtacgccgacctgtttctggccgccaagaacctgtccgacgccatcctgctgagcgacatcctgagagtgaacaccgagatcaccaaggcccccctgagcgcctctatgatcaagagatacgacgagcaccaccaggacctgaccctgctgaaagctctcgtgcggcagcagctgcctgagaagtacaaagagattttcttcgaccagagcaagaacggctacgccggctacattgacggcggagccagccaggaagagttctacaagttcatcaagcccatcctggaaaagatggacggcaccgaggaactgctcgtgaagctgaacagagaggacctgctgcggaagcagcggaccttcgacaacggcagcatcccccaccagatccacctgggagagctgcacgccattctgcggcggcaggaagatttttacccattcctgaaggacaaccgggaaaagatcgagaagatcctgaccttccgcatcccctactacgtgggccctctggccaggggaaacagcagattcgcctggatgaccagaaagagcgaggaaaccatcaccccctggaacttcgaggaagtggtggacaagggcgcttccgcccagagcttcatcgagcggatgaccaacttcgataagaacctgcccaacgagaaggtgctgcccaagcacagcctgctgtacgagtacttcaccgtgtataacgagctgaccaaagtgaaatacgtgaccgagggaatgagaaagcccgccttcctgagcggcgagcagaaaaaggccatcgtggacctgctgttcaagaccaaccggaaagtgaccgtgaagcagctgaaagaggactacttcaagaaaatcgagtgcttcgactccgtggaaatctccggcgtggaagatcggttcaacgcctccctgggcacataccacgatctgctgaaaattatcaaggacaaggacttcctggacaatgaggaaaacgaggacattctggaagatatcgtgctgaccctgacactgtttgaggacagagagatgatcgaggaacggctgaaaacctatgcccacctgttcgacgacaaagtgatgaagcagctgaagcggcggagatacaccggctggggcaggctgagccggaagctgatcaacggcatccgggacaagcagtccggcaagacaatcctggatttcctgaagtccgacggcttcgccaacagaaacttcatgcagctgatccacgacgacagcctgacctttaaagaggacatccagaaagcccaggtgtccggccagggcgatagcctgcacgagcacattgccaatctggccggcagccccgccattaagaagggcatcctgcagacagtgaaggtggtggacgagctcgtgaaagtgatgggccggcacaagcccgagaacatcgtgatcgaaatggccagagagaaccagaccacccagaagggacagaagaacagccgcgagagaatgaagcggatcgaagagggcatcaaagagctgggcagccagatcctgaaagaacaccccgtggaaaacacccagctgcagaacgagaagctgtacctgtactacctgcagaatgggcgggatatgtacgtggaccaggaactggacatcaaccggctgtccgactacgatgtggacgctatcgtgcctcagagctttctgaaggacgactccatcgacaacaaggtgctgaccagaagcgacaagaaccggggcaagagcgacaacgtgccctccgaagaggtcgtgaagaagatgaagaactactggcggcagctgctgaacgccaagctgattacccagagaaagttcgacaatctgaccaaggccgagagaggcggcctgagcgaactggataaggccggcttcatcaagagacagctggtggaaacccggcagatcacaaagcacgtggcacagatcctggactcccggatgaacactaagtacgacgagaatgacaagctgatccgggaagtgaaagtgatcaccctgaagtccaagctggtgtccgatttccggaaggatttccagttttacaaagtgcgcgagatcaacaactaccaccacgcccacgacgcctacctgaacgccgtcgtgggaaccgccctgatcaaaaagtaccctaagctggaaagcgagttcgtgtacggcgactacaaggtgtacgacgtgcggaagatgatcgccaagagcgagcaggaaatcggcaaggctaccgccaagtacttcttctacagcaacatcatgaactttttcaagaccgagattaccctggccaacggcgagatccggaagcggcctctgatcgagacaaacggcgaaaccggggagatcgtgtgggataagggccgggattttgccaccgtgcggaaagtgctgagcatgccccaagtgaatatcgtgaaaaagaccgaggtgcagacaggcggcttcagcaaagagtctatcctgcccaagaggaacagcgataagctgatcgccagaaagaaggactgggaccctaagaagtacggcggcttcgacagccccaccgtggcctattctgtgctggtggtggccaaagtggaaaagggcaagtccaagaaactgaagagtgtgaaagagctgctggggatcaccatcatggaaagaagcagcttcgagaagaatcccatcgactttctggaagccaagggctacaaagaagtgaaaaaggacctgatcatcaagctgcctaagtactccctgttcgagctggaaaacggccggaagagaatgctggcctctgccggcgaactgcagaagggaaacgaactggccctgccctccaaatatgtgaacttcctgtacctggccagccactatgagaagctgaagggctcccccgaggataatgagcagaaacagctgtttgtggaacagcacaagcactacctggacgagatcatcgagcagatcagcgagttctccaagagagtgatcctggccgacgctaatctggacaaagtgctgtccgcctacaacaagcaccgggataagcccatcagagagcaggccgagaatatcatccacctgtttaccctgaccaatctgggagcccctgccgccttcaagtactttgacaccaccatcgaccggaagaggtacaccagcaccaaagaggtgctggacgccaccctgatccaccagagcatcaccggcctgtacgagacacggatcgacctgtctcagctgggaggtgactctggaggatctagcggaggatcctctggcagcgagacaccaggaacaagcgagtcagcaacaccagagagcagtggcggcagcagcggcggcagcagcaccctaaatatagaagatgagtatcggctacatgagacctcaaaagagccagatgtttctctagggtccacatggctgtctgattttcctcaggcctgggcggaaaccgggggcatgggactggcagttcgccaagctcctctgatcatacctctgaaagcaacctctacccccgtgtccataaaacaataccccatgtcacaagaagccagactggggatcaagccccacatacagagactgttggaccagggaatactggtaccctgccagtccccctggaacacgcccctgctacccgttaagaaaccagggactaatgattataggcctgtccaggatctgagagaagtcaacaagcgggtggaagacatccaccccaccgtgcccaacccttacaacctcttgagcgggctcccaccgtcccaccagtggtacactgtgcttgatttaaaggatgcctttttctgcctgagactccaccccaccagtcagcctctcttcgcctttgagtggagagatccagagatgggaatctcaggacaattgacctggaccagactcccacagggtttcaaaaacagtcccaccctgtttaatgaggcactgcacagagacctagcagacttccggatccagcacccagacttgatcctgctacagtacgtggatgacttactgctggccgccacttctgagctagactgccaacaaggtactcgggccctgttacaaaccctagggaacctcgggtatcgggcctcggccaagaaagcccaaatttgccagaaacaggtcaagtatctggggtatcttctaaaagagggtcagagatggctgactgaggccagaaaagagactgtgatggggcagcctactccgaagacccctcgacaactaagggagttcctagggaaggcaggcttctgtcgcctcttcatccctgggtttgcagaaatggcagcccccctgtaccctctcaccaaaccggggactctgtttaattggggcccagaccaacaaaaggcctatcaagaaatcaagcaagctcttctaactgccccagccctggggttgccagatttgactaagccctttgaactctttgtcgacgagaagcagggctacgccaaaggtgtcctaacgcaaaaactgggaccttggcgtcggccggtggcctacctgtccaaaaagctagacccagtagcagctgggtggcccccttgcctacggatggtagcagccattgccgtactgacaaaggatgcaggcaagctaaccatgggacagccactagtcattctggccccccatgcagtagaggcactagtcaaacaaccccccgaccgctggctttccaacgcccggatgactcactatcaggccttgcttttggacacggaccgggtccagttcggaccggtggtagccctgaacccggctacgctgctcccactgcctgaggaagggctgcaacacaactgccttgatatcctggccgaagcccacggaacccgacccgacctaacggaccagccgctcccagacgccgaccacacctggtacacggatggaagcagtctcttacaagagggacagcgtaaggcgggagctgcggtgaccaccgagaccgaggtaatctgggctaaagccctgccagccgggacatccgctcagcgggctgaactgatagcactcacccaggccctaaagatggcagaaggtaagaagctaaatgtttatactgatagccgttatgcttttgctactgcccatatccatggagaaatatacagaaggcgtgggtggctcacatcagaaggcaaagagatcaaaaataaagacgagatcttggccctactaaaagccctctttctgcccaaaagacttagcataatccattgtccaggacatcaaaagggacacagcgccgaggctagaggcaaccggatggctgaccaagcggcccgaaaggcagccatcacagagactccagacacctctaccctcctcatagaaaattcatcaccctctggcggctcaaaaagaaccgccgacggcagcgaattcgagcccaagaagaagaggaaagtctaaccggtcatcatcaccatcaccat

SEQ ID NO: 1116 - RNA, 20 nt, synthetic construct
  source 1..20: mol_type = other RNA
  misc_feature 1..20: note = gRNA Sequence 5'-3'
catcccggccgcctacaagc

SEQ ID NO: 1117 - RNA, 20 nt, synthetic construct
  source 1..20: mol_type = other RNA
  misc_feature 1..20: note = gRNA Sequence 5'-3'
gcattaacccttccgcggcc

SEQ ID NO: 1118 - RNA, 20 nt, synthetic construct
  source 1..20: mol_type = other RNA
  misc_feature 1..20: note = gRNA Sequence 5'-3'
cgcgcgcccgaccttcccat

SEQ ID NO: 1119 - RNA, 20 nt, synthetic construct
  source 1..20: mol_type = other RNA
  misc_feature 1..20: note = gRNA Sequence 5'-3'
gcgccgcattaacccttccg

SEQ ID NO: 1120 - RNA, 20 nt, synthetic construct
  source 1..20: mol_type = other RNA
  misc_feature 1..20: note = gRNA Sequence 5'-3'
tctgggcgcgcgagtcccag

SEQ ID NO: 1121 - RNA, 20 nt, synthetic construct
  source 1..20: mol_type = other RNA
  misc_feature 1..20: note = gRNA Sequence 5'-3'
ttagtcgctaatctggggtg

SEQ ID NO: 1122 - RNA, 20 nt, synthetic construct
  source 1..20: mol_type = other RNA
  misc_feature 1..20: note = gRNA Sequence 5'-3'
actcgcgcgcccagaagagg

SEQ ID NO: 1123 - RNA, 20 nt, synthetic construct
  source 1..20: mol_type = other RNA
  misc_feature 1..20: note = gRNA Sequence 5'-3'
actcggcgcggctcagccaa

SEQ ID NO: 1124 - RNA, 20 nt, synthetic construct
  source 1..20: mol_type = other RNA
  misc_feature 1..20: note = gRNA Sequence 5'-3'
ggtttcttagtcgctaatct

SEQ ID NO: 1125 - RNA, 20 nt, synthetic construct
  source 1..20: mol_type = other RNA
  misc_feature 1..20: note = gRNA Sequence 5'-3'
cgttgggggagcactcggcg

SEQ ID NO: 1126 - RNA, 20 nt, synthetic construct
  source 1..20: mol_type = other RNA
  misc_feature 1..20: note = gRNA Sequence 5'-3'
tagtcgctaatctggggtgg

SEQ ID NO: 1127 - RNA, 20 nt, synthetic construct
  source 1..20: mol_type = other RNA
  misc_feature 1..20: note = gRNA Sequence 5'-3'
cggccgcggaagggttaatg

SEQ ID NO: 1128 - RNA, 20 nt, synthetic construct
  source 1..20: mol_type = other RNA
  misc_feature 1..20: note = gRNA Sequence 5'-3'
gtttcttagtcgctaatctg

SEQ ID NO: 1129 - RNA, 20 nt, synthetic construct
  source 1..20: mol_type = other RNA
  misc_feature 1..20: note = gRNA Sequence 5'-3'
atgggaaggtcgggcgcgcg

SEQ ID NO: 1130 - RNA, 20 nt, synthetic construct
  source 1..20: mol_type = other RNA
  misc_feature 1..20: note = gRNA Sequence 5'-3'
tgccatggccggcttgtagg

SEQ ID NO: 1131 - RNA, 20 nt, synthetic construct
  source 1..20: mol_type = other RNA
  misc_feature 1..20: note = gRNA Sequence 5'-3'
aaggtcgggcgcgcgcggtg

SEQ ID NO: 1132 - RNA, 20 nt, synthetic construct
  source 1..20: mol_type = other RNA
  misc_feature 1..20: note = gRNA Sequence 5'-3'
gcgcggctcagccaatggga

SEQ ID NO: 1133 - RNA, 20 nt, synthetic construct
  source 1..20: mol_type = other RNA
  misc_feature 1..20: note = gRNA Sequence 5'-3'
gcaggggaaaccgtgaggac

SEQ ID NO: 1134 - RNA, 20 nt, synthetic construct
  source 1..20: mol_type = other RNA
  misc_feature 1..20: note = gRNA Sequence 5'-3'
gacagccgctccagcgcccg

SEQ ID NO: 1135 - RNA, 20 nt, synthetic construct
  source 1..20: mol_type = other RNA
  misc_feature 1..20: note = gRNA Sequence 5'-3'
cgctctgccaaggagcccct

SEQ ID NO: 1136 - RNA, 20 nt, synthetic construct
  source 1..20: mol_type = other RNA
  misc_feature 1..20: note = gRNA Sequence 5'-3'
aagagggggaagggaccctt

SEQ ID NO: 1137 - RNA, 20 nt, synthetic construct
  source 1..20: mol_type = other RNA
  misc_feature 1..20: note = gRNA Sequence 5'-3'
aaccgtgaggacaggtgcca

SEQ ID NO: 1138 - RNA, 20 nt, synthetic construct
  source 1..20: mol_type = other RNA
  misc_feature 1..20: note = gRNA Sequence 5'-3'
gctgtcggcgcggtggcagg

SEQ ID NO: 1139 - RNA, 20 nt, synthetic construct
  source 1..20: mol_type = other RNA
  misc_feature 1..20: note = gRNA Sequence 5'-3'
cgcgagtcccaggggctcct

SEQ ID NO: 1140 - RNA, 20 nt, synthetic construct
  source 1..20: mol_type = other RNA
  misc_feature 1..20: note = gRNA Sequence 5'-3'
cagagcgaggggctggcgtt

SEQ ID NO: 1141 - RNA, 20 nt, synthetic construct
  source 1..20: mol_type = other RNA
  misc_feature 1..20: note = gRNA Sequence 5'-3'
tggagcggctgtcggcgcgg

SEQ ID NO: 1142 - RNA, 20 nt, synthetic construct
  source 1..20: mol_type = other RNA
  misc_feature 1..20: note = gRNA Sequence 5'-3'
cttaggcaggggaaaccgtg

SEQ ID NO: 1143 - RNA, 20 nt, synthetic construct
  source 1..20: mol_type = other RNA
  misc_feature 1..20: note = gRNA Sequence 5'-3'
gccagcccctcgctctgcca

SEQ ID NO: 1144 - RNA, 20 nt, synthetic construct
  source 1..20: mol_type = other RNA
  misc_feature 1..20: note = gRNA Sequence 5'-3'
ctcgggcagcgcctgcggct

SEQ ID NO: 1145 - RNA, 20 nt, synthetic construct
  source 1..20: mol_type = other RNA
  misc_feature 1..20: note = gRNA Sequence 5'-3'
tggaatcccttcccccatcc

SEQ ID NO: 1146 - RNA, 20 nt, synthetic construct
  source 1..20: mol_type = other RNA
  misc_feature 1..20: note = gRNA Sequence 5'-3'
gggaagggacccttaggcag

SEQ ID NO: 1147 - RNA, 20 nt, synthetic construct
  source 1..20: mol_type = other RNA
  misc_feature 1..20: note = gRNA Sequence 5'-3'
caggagtccggggctcgggc

SEQ ID NO: 1148 - RNA, 20 nt, synthetic construct
  source 1..20: mol_type = other RNA
  misc_feature 1..20: note = gRNA Sequence 5'-3'
gagcgaggggctggcgttgg

SEQ ID NO: 1149 - RNA, 20 nt, synthetic construct
  source 1..20: mol_type = other RNA
  misc_feature 1..20: note = gRNA Sequence 5'-3'
aggcggccgggatgggggaa

SEQ ID NO: 1150 - RNA, 20 nt, synthetic construct
  source 1..20: mol_type = other RNA
  misc_feature 1..20: note = gRNA Sequence 5'-3'
aggcgggagccaggagtccg

SEQ ID NO: 1151 - RNA, 20 nt, synthetic construct
  source 1..20: mol_type = other RNA
  misc_feature 1..20: note = gRNA Sequence 5'-3'
gggtcccttccccctcttct

SEQ ID NO: 1152 - RNA, 20 nt, synthetic construct
  source 1..20: mol_type = other RNA
  misc_feature 1..20: note = gRNA Sequence 5'-3'
gagccaggagtccggggctc

SEQ ID NO: 1153 - RNA, 20 nt, synthetic construct
  source 1..20: mol_type = other RNA
  misc_feature 1..20: note = gRNA Sequence 5'-3'
gggggagagggcggtgctgc

SEQ ID NO: 1154 - RNA, 20 nt, synthetic construct
  source 1..20: mol_type = other RNA
  misc_feature 1..20: note = gRNA Sequence 5'-3'
ggcgggatgggggggggaga

SEQ ID NO: 1155 - RNA, 20 nt, synthetic construct
  source 1..20: mol_type = other RNA
  misc_feature 1..20: note = gRNA Sequence 5'-3'
gggatgggggggggagaggg

SEQ ID NO: 1156 - DNA, 21 bp, synthetic construct
  source 1..21: mol_type = other DNA
gagggcctatttcccatgatt

SEQ ID NO: 1157 - DNA, 20 bp, synthetic construct
  source 1..20: mol_type = other DNA
ctcctcgttggcattgacgt

SEQ ID NO: 1158 - DNA, 76 bp, synthetic construct
  source 1..76: mol_type = other DNA
gttttagagctagaaatagcaagttaaaataaggctagtccgttatcaacttgaaaaagtggcaccgagtcggtgc

SEQ ID NO: 1159 - DNA, 12 bp, synthetic construct
  source 1..12: mol_type = other DNA
gcaccacctaca

SEQ ID NO: 1160 - DNA, 13 bp, synthetic construct
  source 1..13: mol_type = other DNA
tcaatgccaacga
